(19) United States
(12) Patent Application Publication
(10) Pub. No.: US 2010/0190163 A1
(43) Pub. Date: Jul. 29, 2010

(54) CANCER ANTIGEN-SPECIFIC T-CELL RECEPTOR GENE, PEPTIDE ENCODED BY THE GENE, AND USE OF THEM

(75) Inventor: Haruo Sugiyama, Osaka (JP)

Correspondence Address: FINNEGAN, HENDERSON, FARABOW, GARRETT & DUNNER;LLP, 901 NEW YORK AVENUE, NW, WASHINGTON, DC, 20001-4413, US

(73) Assignee: INTERNATIONAL INSTITUTE OF CANCER IMMUNOLOGY, INC., Osaka (JP)

(21) Appl. No.: 12/529,701

(22) PCT Filed: Feb. 28, 2008
(86) PCT No.: PCT/JP2008/053469

§ 371 Date: Mar. 26, 2010

(30) Foreign Application Priority Data
Mar. 5, 2007 (JP) 2007-054215

(51) Int. Cl. C12Q 1/68; G01N 33/53; C12N 5/071; C12M 1/34; C07K 7/06; C07K 7/08; C07K 16/00; C07H 21/04

(52) U.S. Cl. 435/6; 435/7.1; 435/372; 435/287.2; 530/326; 530/327; 530/387.9; 536/23.5; 536/24.33

(57) ABSTRACT

Disclosed are: a nucleotide sequence and an amino acid sequence for CDR3 region of T-cell receptor (TCR) gene of WT1-specific cytotoxic T-cell (CTL) for WT1 protein; a method for the detection or treatment of cancer using the nucleotide sequence or the amino acid sequence; and a chip, a primer set, a kit, an apparatus and the like for use in the detection of cancer, each of which comprises the nucleotide sequence or the amino acid sequence.

### TECHNICAL FIELD

[0001] The present invention relates to a polynucleotide contained in the gene for a cancer antigen-specific T-cell receptor, and the peptide encoded by the polynucleotide, and to cancer tests, e.g., diagnosis, prognosis, or treatment monitoring using the same, cancer therapy, and the like.

### BACKGROUND ART

[0002] Cancer treatments include extirpation of cancer by surgical operation, radiotherapy, treatment with anti-cancer medication, and immunotherapy. Among these treatments, immunotherapy in particular has drawn attention in recent years because it is a treatment more selective and specific against cancer with least side effects. Inter alia, attempts have been extensively made to treat cancer and leukemia by targeting WT1 protein, which is abundantly present in many types of cancer cells and leukemia cells. In order to study the mechanism of the WT1-targeted anti-cancer therapy and to further increase the effect of the therapy, it is necessary to identify the nucleotide sequences of the T-cell receptor (TCR) genes of WT1-specific cytotoxic T-cells (CTL) and the amino acid sequences of the receptor peptides encoded by the nucleotide sequences. However, up to the present date, little is known about the sequences of those receptor genes and the receptor peptides, let alone that no effective use of them has been described, although a number of researches have been conducted (see, e.g., non-patent documents 1-5).

[0003] Non-Patent Document 1: Valmori D. et al., J. Immunol. 168: 4231-4240, 2002

[0004] Non-Patent Document 2: Dietrich P Y. et al., Cancer Res. 61: 2047-2054, 2001

[0005] Non-Patent Document 3: Coulie P G. et al., Proc. Natl. Acad. Sci. U.S.A. 98: 10290-10295, 2001

[0006] Non-Patent Document 4: Godelaine D. et al. J. Immunol. 171: 4893-4897, 2003

[0007] Non-Patent Document 5: Mandruzzato S. et al., J. Immunol. 169: 4017-4024, 2002

### SUMMARY OF THE INVENTION

[0008] An object of the present invention was to reveal the amino acid sequences of T-cell receptors (TCRs) of WT1-specific cytotoxic T-cells (CTLs) for WT1 protein, and the nucleotide sequences of the genes encoding them, in particular, the amino acid and nucleotide sequences of the CDR3 region of them, as well as to use those pieces of information in cancer tests (diagnosis, prognosis, treatment monitoring, or the like) and in cancer therapy.

### DISCLOSURE OF INVENTION

### Problems to be Solved by the Invention

[0009] To accomplish the above object, the present inventors have conducted extensive research and determined, for the first time, the nucleotide and amino acid sequences of CD3 of the Vβ chain of T-cell receptors (TCRs) of WT1-specific cytotoxic T-cells (CTLs) from healthy individuals and HLA-A*2402-positive patients, and have thereby completed the present invention.

[0010] Thus, the present invention provides the following:

(1) A polynucleotide having a nucleotide sequence encoding CDR3 of a Vβ chain of a T-cell receptor (TCR) of a WT1-specific cytotoxic T-cell (CTL), said polynucleotide having DNA having any of the CDR3 nucleotide sequences shown in SEQ ID Nos.: 1-1695, RNA complementary to the DNA, or a polynucleotide having a complementary sequence thereof;
(2) The polynucleotide according to (1), wherein said polynucleotide consists of a DNA comprising any of the CDR3 nucleotide sequences shown in SEQ ID Nos.: 1-1695, or an RNA complementary thereto, or complementary sequences thereof;
(3) A peptide having an amino acid sequence of CDR3 of a Vβ chain of a T-cell receptor (TCR) of a WT1-specific cytotoxic T-cell (CTL), said peptide having any of the amino acid sequences of CDR3 shown in SEQ ID Nos.: 1696-3389;
(4) The peptide according to (3) consisting of any of the amino acid sequences of CDR3 shown in SEQ ID Nos.: 1696-3389;
(5) Use of the polynucleotide of (1) or (2), or the peptide of (3) or (4) as a cancer marker;
(6) A method for diagnosing cancer in an HLA-A*2402-positive patient, which comprises assessing the clonality of a WT1-specific CTL having any of the polynucleotides of (1) or (2), or any of the peptides of (3) or (4) in a sample obtained from the patient before therapy, wherein when a WT1-specific CTL having a multiplicity of clonality is present, the patient is determined to have a possibility of having cancer;
(7) The method according to (6), wherein a higher possibility of developing cancer in the patient before therapy is determined when the clonality of a WT1-specific CTL having any of the CDR3 polynucleotides or any of the CDR3 peptides and having the clonality of 3 or more is higher, or when the types of a WT1-specific CTL having the clonality of 3 or more are more abundant;
(8) A method for testing for sensitivity of an HLA-A*2402-positive patient to WT1 peptide immunotherapy, which comprises assessing the clonality and the number of types of WT1-specific CTLs having any of the polynucleotides of (1) or (2) or any of the peptides of (3) or (4) in a sample obtained from the patient before therapy, wherein the patient is determined to have sensitivity to WT1 peptide immunotherapy when the types of WT1-specific CTLs with a multiplicity of clonality are more abundant in the patient than in a subject non-responsive to the therapy;
(9) The method according to (8), wherein a patient is determined to have higher sensitivity to WT1 peptide immunotherapy when the types of WT1-specific CTL clones with a multiplicity of clonality are more abundant, or the clonality is larger in the patient before the therapy;
(10) A method for monitoring WT1 peptide immunotherapy in an HLA-A*2402-positive patient, which comprises assessing the clonality of WT1-specific CTL clones having any of the polynucleotides of (1) or (2) or any of the peptides of (3) or (4) in a sample obtained from the patient before and after the therapy, wherein the patient is determined to have responded to WT1 peptide immunotherapy when the clonality of any of the WT1-specific CTL clones increases after the therapy compared to before the therapy;
(11) The method according to (10), wherein a patient is determined to have higher responsiveness to WT1 peptide immunotherapy when the larger becomes the increase rate in the clonality, or the more abundant become the types of clones with increased clonality after the WT1 peptide immunotherapy;
(12) An antibody against the peptide of (3) or (4);
(13) A chip comprising the polynucleotide of (1) or (2), the peptide of (3) or (4), or the antibody of (12);
(14) A primer for amplifying a CDR3 polypeptide, which has a sequence selected from the sequences shown in SEQ ID Nos.: 3389-3416;
(15) A kit for diagnosing cancer, a kit for testing for sensitivity of a patient to WT1 peptide immunotherapy, or a kit for monitoring WT1 peptide immunotherapy, comprising means for detecting a WT1-specific CTL having the polynucleotide of (1) or (2) or the peptide of (3) or (4);
(16) A device for cancer diagnosis, a device for testing for sensitivity of a patient to WT1 peptide immunotherapy, or a device for monitoring WT1 peptide immunotherapy, comprising means for detecting a WT1-specific CTL having the polynucleotide of (1) or (2) or the peptide of (3) or (4);
(17) The kit according to (15), comprising the chip of (13) or the primer of (14);
(18) The device according to (16), wherein the chip of (13) or the primer of (14) is used in the device;
(19) A lymphocyte of an HLA-A*2402-positive cancer patient, into which a T-cell receptor gene comprising a sequence of the polynucleotide of (1) or (2) is introduced.

[0011] The present invention also provides cancer therapy using lymphocytes from HLA-A*2402-positive patients, wherein a T-cell receptor gene containing a CDR3 polynucleotide is introduced into the lymphocytes.

[0012] Further, the present invention provides an antibody raised against a CDR3 polypeptide and use thereof.

### EFFECT OF THE INVENTION

[0013] By virtue of the present invention, the nucleotide sequences contained in the gene for the Vβ chain of T-cell receptors (TCRs) of WT1-specific cytotoxic T-cells (CTLs), and the amino acid sequences of peptides encoded by them, in particular, the nucleotide and amino acid sequences of CDR3 have been revealed, and extensive cancer tests (diagnosis, prognosis, treatment monitoring, or the like), cancer therapy, and the like are enabled using these polynucleotides and peptides.

### BRIEF DESCRIPTION OF DRAWINGS

[0014] FIG. 1-1 shows the nucleotide and amino acid sequences of CDR3 of the Vβ chain of T-cell receptors (TCRs) of WT1-specific cytotoxic T-cells (CTLs) from healthy individuals and HLA-A*2402-positive patients, which sequences have been identified in the present invention. In the figure, “clone #” indicates the clone numbers, the numbers to the left of the dot indicate the family numbers of Vβ chains, and the numbers to the right of the dot indicate the reference numbers. V name, J name, and D name indicate the details of the V region, J region, and D region, respectively. The letters “V-REGION . . . N1 . . . D-REGION . . . (P)N2 . . . J-REGION” on the nucleotide sequence indicate the origins of each portion of the nucleotide sequence.

[0015] FIG. 1-2 shows the nucleotide and amino acid sequences of CDR3 of the Vβ chain of T-cell receptors (TCRs) of WT1-specific cytotoxic T-cells (CTLs) from healthy individuals and HLA-A*2402-positive patients, which sequences have been identified in the present invention. In the figure, “clone #” indicates the clone numbers, the numbers to the left of the dot indicate the family numbers of Vβ chains, and the numbers to the right of the dot indicate the reference numbers. V name, J name, and D name indicate the details of the V region, J region, and D region, respectively. The letters “V-REGION . . . N1 . . . D-REGION . . . (P)N2 . . . J-REGION” on the nucleotide sequence indicate the origins of each portion of the nucleotide sequence.

[0016] FIG. 1-3 shows the nucleotide and amino acid sequences of CDR3 of the Vβ chain of T-cell receptors (TCRs) of WT1-specific cytotoxic T-cells (CTLs) from healthy individuals and HLA-A*2402-positive patients, which sequences have been identified in the present invention. In the figure, “clone #” indicates the clone numbers, the numbers to the left of the dot indicate the family numbers of Vβ chains, and the numbers to the right of the dot indicate the reference numbers. V name, J name, and D name indicate the details of the V region, J region, and D region, respectively. The letters “V-REGION . . . N1 . . . D-REGION . . . (P)N2 . . . J-REGION” on the nucleotide sequence indicate the origins of each portion of the nucleotide sequence.

[0017] FIG. 1-4 shows the nucleotide and amino acid sequences of CDR3 of the Vβ chain of T-cell receptors (TCRs) of WT1-specific cytotoxic T-cells (CTLs) from healthy individuals and HLA-A*2402-positive patients, which sequences have been identified in the present invention. In the figure, “clone #” indicates the clone numbers, the numbers to the left of the dot indicate the family numbers of Vβ chains, and the numbers to the right of the dot indicate the reference numbers. V name, J name, and D name indicate the details of the V region, J region, and D region, respectively. The letters “V-REGION . . . N1 . . . D-REGION . . . (P)N2 . . . J-REGION” on the nucleotide sequence indicate the origins of each portion of the nucleotide sequence.

[0018] FIG. 1-5 shows the nucleotide and amino acid sequences of CDR3 of the Vβ chain of T-cell receptors (TCRs) of WT1-specific cytotoxic T-cells (CTLs) from healthy individuals and HLA-A*2402-positive patients, which sequences have been identified in the present invention. In the figure, “clone #” indicates the clone numbers, the numbers to the left of the dot indicate the family numbers of Vβ chains, and the numbers to the right of the dot indicate the reference numbers. V name, J name, and D name indicate the details of the V region, J region, and D region, respectively. The letters “V-REGION . . . N1 . . . D-REGION . . . (P)N2 . . . J-REGION” on the nucleotide sequence indicate the origins of each portion of the nucleotide sequence.

[0019] FIG. 1-6 shows the nucleotide and amino acid sequences of CDR3 of the Vβ chain of T-cell receptors (TCRs) of WT1-specific cytotoxic T-cells (CTLs) from healthy individuals and HLA-A*2402-positive patients, which sequences have been identified in the present invention. In the figure, “clone #” indicates the clone numbers, the numbers to the left of the dot indicate the family numbers of Vβ chains, and the numbers to the right of the dot indicate the reference numbers. V name, J name, and D name indicate the details of the V region, J region, and D region, respectively. The letters “V-REGION . . . N1 . . . D-REGION . . . (P)N2 . . . J-REGION” on the nucleotide sequence indicate the origins of each portion of the nucleotide sequence.

[0020] FIG. 1-7 shows the nucleotide and amino acid sequences of CDR3 of the Vβ chain of T-cell receptors (TCRs) of WT1-specific cytotoxic T-cells (CTLs) from healthy individuals and HLA-A*2402-positive patients, which sequences have been identified in the present invention. In the figure, “clone #” indicates the clone numbers, the numbers to the left of the dot indicate the family numbers of Vβ chains, and the numbers to the right of the dot indicate the reference numbers. V name, J name, and D name indicate the details of the V region, J region, and D region, respectively. The letters “V-REGION . . . N1 . . . D-REGION . . . (P)N2 . . . J-REGION” on the nucleotide sequence indicate the origins of each portion of the nucleotide sequence.

[0021] FIG. 1-8 shows the nucleotide and amino acid sequences of CDR3 of the Vβ chain of T-cell receptors (TCRs) of WT1-specific cytotoxic T-cells (CTLs) from healthy individuals and HLA-A*2402-positive patients, which sequences have been identified in the present invention. In the figure, “clone #” indicates the clone numbers, the numbers to the left of the dot indicate the family numbers of Vβ chains, and the numbers to the right of the dot indicate the reference numbers. V name, J name, and D name indicate the details of the V region, J region, and D region, respectively. The letters “V-REGION . . . N1 . . . D-REGION . . . (P)N2 . . . J-REGION” on the nucleotide sequence indicate the origins of each portion of the nucleotide sequence.

[0022] FIG. 1-9 shows the nucleotide and amino acid sequences of CDR3 of the Vβ chain of T-cell receptors (TCRs) of WT1-specific cytotoxic T-cells (CTLs) from healthy individuals and HLA-A*2402-positive patients, which sequences have been identified in the present invention. In the figure, “clone #” indicates the clone numbers, the numbers to the left of the dot indicate the family numbers of Vβ chains, and the numbers to the right of the dot indicate the reference numbers. V name, J name, and D name indicate the details of the V region, J region, and D region, respectively. The letters “V-REGION . . . N1 . . . D-REGION . . . (P)N2 . . . J-REGION” on the nucleotide sequence indicate the origins of each portion of the nucleotide sequence.

[0023] FIG. 1-10 shows the nucleotide and amino acid sequences of CDR3 of the Vβ chain of T-cell receptors (TCRs) of WT1-specific cytotoxic T-cells (CTLs) from healthy individuals and HLA-A*2402-positive patients, which sequences have been identified in the present invention. In the figure, “clone #” indicates the clone numbers, the numbers to the left of the dot indicate the family numbers of Vβ chains, and the numbers to the right of the dot indicate the reference numbers. V name, J name, and D name indicate the details of the V region, J region, and D region, respectively. The letters “V-REGION . . . N1 . . . D-REGION . . . (P)N2 . . . J-REGION” on the nucleotide sequence indicate the origins of each portion of the nucleotide sequence.

[0024] FIG. 1-11 shows the nucleotide and amino acid sequences of CDR3 of the Vβ chain of T-cell receptors (TCRs) of WT1-specific cytotoxic T-cells (CTLs) from healthy individuals and HLA-A*2402-positive patients, which sequences have been identified in the present invention. In the figure, “clone #” indicates the clone numbers, the numbers to the left of the dot indicate the family numbers of Vβ chains, and the numbers to the right of the dot indicate the reference numbers. V name, J name, and D name indicate the details of the V region, J region, and D region, respectively. The letters “V-REGION . . . N1 . . . D-REGION . . . (P)N2 . . . J-REGION” on the nucleotide sequence indicate the origins of each portion of the nucleotide sequence.

[0025] FIG. 1-12 shows the nucleotide and amino acid sequences of CDR3 of the Vβ chain of T-cell receptors (TCRs) of WT1-specific cytotoxic T-cells (CTLs) from healthy individuals and HLA-A*2402-positive patients, which sequences have been identified in the present invention. In the figure, “clone #” indicates the clone numbers, the numbers to the left of the dot indicate the family numbers of Vβ chains, and the numbers to the right of the dot indicate the reference numbers. V name, J name, and D name indicate the details of the V region, J region, and D region, respectively. The letters “V-REGION . . . N1 . . . D-REGION . . . (P)N2 . . . J-REGION” on the nucleotide sequence indicate the origins of each portion of the nucleotide sequence.

[0026] FIG. 1-13 shows the nucleotide and amino acid sequences of CDR3 of the Vβ chain of T-cell receptors (TCRs) of WT1-specific cytotoxic T-cells (CTLs) from healthy individuals and HLA-A*2402-positive patients, which sequences have been identified in the present invention. In the figure, “clone #” indicates the clone numbers, the numbers to the left of the dot indicate the family numbers of Vβ chains, and the numbers to the right of the dot indicate the reference numbers. V name, J name, and D name indicate the details of the V region, J region, and D region, respectively. The letters “V-REGION . . . N1 . . . D-REGION . . . (P)N2 . . . J-REGION” on the nucleotide sequence indicate the origins of each portion of the nucleotide sequence.

[0027] FIG. 1-14 shows the nucleotide and amino acid sequences of CDR3 of the Vβ chain of T-cell receptors (TCRs) of WT1-specific cytotoxic T-cells (CTLs) from healthy individuals and HLA-A*2402-positive patients, which sequences have been identified in the present invention. In the figure, “clone #” indicates the clone numbers, the numbers to the left of the dot indicate the family numbers of Vβ chains, and the numbers to the right of the dot indicate the reference numbers. V name, J name, and D name indicate the details of the V region, J region, and D region, respectively. The letters “V-REGION . . . N1 . . . D-REGION . . . (P)N2 . . . J-REGION” on the nucleotide sequence indicate the origins of each portion of the nucleotide sequence.

[0028] FIG. 1-15 shows the nucleotide and amino acid sequences of CDR3 of the Vβ chain of T-cell receptors (TCRs) of WT1-specific cytotoxic T-cells (CTLs) from healthy individuals and HLA-A*2402-positive patients, which sequences have been identified in the present invention. In the figure, “clone #” indicates the clone numbers, the numbers to the left of the dot indicate the family numbers of Vβ chains, and the numbers to the right of the dot indicate the reference numbers. V name, J name, and D name indicate the details of the V region, J region, and D region, respectively. The letters “V-REGION . . . N1 . . . D-REGION . . . (P)N2 . . . J-REGION” on the nucleotide sequence indicate the origins of each portion of the nucleotide sequence.

[0029] FIG. 1-16 shows the nucleotide and amino acid sequences of CDR3 of the Vβ chain of T-cell receptors (TCRs) of WT1-specific cytotoxic T-cells (CTLs) from healthy individuals and HLA-A*2402-positive patients, which sequences have been identified in the present invention. In the figure, “clone #” indicates the clone numbers, the numbers to the left of the dot indicate the family numbers of Vβ chains, and the numbers to the right of the dot indicate the reference numbers. V name, J name, and D name indicate the details of the V region, J region, and D region, respectively. The letters “V-REGION . . . N1 . . . D-REGION . . . (P)N2 . . . J-REGION” on the nucleotide sequence indicate the origins of each portion of the nucleotide sequence.

[0030] FIG. 1-17 shows the nucleotide and amino acid sequences of CDR3 of the Vβ chain of T-cell receptors (TCRs) of WT1-specific cytotoxic T-cells (CTLs) from healthy individuals and HLA-A*2402-positive patients, which sequences have been identified in the present invention. In the figure, “clone #” indicates the clone numbers, the numbers to the left of the dot indicate the family numbers of Vβ chains, and the numbers to the right of the dot indicate the reference numbers. V name, J name, and D name indicate the details of the V region, J region, and D region, respectively. The letters “V-REGION . . . N1 . . . D-REGION . . . (P)N2 . . . J-REGION” on the nucleotide sequence indicate the origins of each portion of the nucleotide sequence.

[0031] FIG. 1-18 shows the nucleotide and amino acid sequences of CDR3 of the Vβ chain of T-cell receptors (TCRs) of WT1-specific cytotoxic T-cells (CTLs) from healthy individuals and HLA-A*2402-positive patients, which sequences have been identified in the present invention. In the figure, “clone #” indicates the clone numbers, the numbers to the left of the dot indicate the family numbers of Vβ chains, and the numbers to the right of the dot indicate the reference numbers. V name, J name, and D name indicate the details of the V region, J region, and D region, respectively. The letters “V-REGION . . . N1 . . . D-REGION . . . (P)N2 . . . J-REGION” on the nucleotide sequence indicate the origins of each portion of the nucleotide sequence.

[0032] FIG. 1-19 shows the nucleotide and amino acid sequences of CDR3 of the Vβ chain of T-cell receptors (TCRs) of WT1-specific cytotoxic T-cells (CTLs) from healthy individuals and HLA-A*2402-positive patients, which sequences have been identified in the present invention. In the figure, “clone #” indicates the clone numbers, the numbers to the left of the dot indicate the family numbers of Vβ chains, and the numbers to the right of the dot indicate the reference numbers. V name, J name, and D name indicate the details of the V region, J region, and D region, respectively. The letters “V-REGION . . . N1 . . . D-REGION . . . (P)N2 . . . J-REGION” on the nucleotide sequence indicate the origins of each portion of the nucleotide sequence.

[0033] FIG. 1-20 shows the nucleotide and amino acid sequences of CDR3 of the Vβ chain of T-cell receptors (TCRs) of WT1-specific cytotoxic T-cells (CTLs) from healthy individuals and HLA-A*2402-positive patients, which sequences have been identified in the present invention. In the figure, “clone #” indicates the clone numbers, the numbers to the left of the dot indicate the family numbers of Vβ chains, and the numbers to the right of the dot indicate the reference numbers. V name, J name, and D name indicate the details of the V region, J region, and D region, respectively. The letters “V-REGION . . . N1 . . . D-REGION . . . (P)N2 . . . J-REGION” on the nucleotide sequence indicate the origins of each portion of the nucleotide sequence.

[0034] FIG. 1-21 shows the nucleotide and amino acid sequences of CDR3 of the Vβ chain of T-cell receptors (TCRs) of WT1-specific cytotoxic T-cells (CTLs) from healthy individuals and HLA-A*2402-positive patients, which sequences have been identified in the present invention. In the figure, “clone #” indicates the clone numbers, the numbers to the left of the dot indicate the family numbers of Vβ chains, and the numbers to the right of the dot indicate the reference numbers. V name, J name, and D name indicate the details of the V region, J region, and D region, respectively. The letters “V-REGION . . . N1 . . . D-REGION . . . (P)N2 . . . J-REGION” on the nucleotide sequence indicate the origins of each portion of the nucleotide sequence.

[0035] FIG. 1-22 shows the nucleotide and amino acid sequences of CDR3 of the Vβ chain of T-cell receptors (TCRs) of WT1-specific cytotoxic T-cells (CTLs) from healthy individuals and HLA-A*2402-positive patients, which sequences have been identified in the present invention. In the figure, “clone #” indicates the clone numbers, the numbers to the left of the dot indicate the family numbers of Vβ chains, and the numbers to the right of the dot indicate the reference numbers. V name, J name, and D name indicate the details of the V region, J region, and D region, respectively. The letters “V-REGION . . . N1 . . . D-REGION . . . (P)N2 . . . J-REGION” on the nucleotide sequence indicate the origins of each portion of the nucleotide sequence.

[0036] FIG. 1-23 shows the nucleotide and amino acid sequences of CDR3 of the Vβ chain of T-cell receptors (TCRs) of WT1-specific cytotoxic T-cells (CTLs) from healthy individuals and HLA-A*2402-positive patients, which sequences have been identified in the present invention. In the figure, “clone #” indicates the clone numbers, the numbers to the left of the dot indicate the family numbers of Vβ chains, and the numbers to the right of the dot indicate the reference numbers. V name, J name, and D name indicate the details of the V region, J region, and D region, respectively. The letters “V-REGION . . . N1 . . . D-REGION . . . (P)N2 . . . J-REGION” on the nucleotide sequence indicate the origins of each portion of the nucleotide sequence.

[0037] FIG. 1-24 shows the nucleotide and amino acid sequences of CDR3 of the Vβ chain of T-cell receptors (TCRs) of WT1-specific cytotoxic T-cells (CTLs) from healthy individuals and HLA-A*2402-positive patients, which sequences have been identified in the present invention. In the figure, “clone #” indicates the clone numbers, the numbers to the left of the dot indicate the family numbers of Vβ chains, and the numbers to the right of the dot indicate the reference numbers. V name, J name, and D name indicate the details of the V region, J region, and D region, respectively. The letters “V-REGION . . . N1 . . . D-REGION . . . (P)N2 . . . J-REGION” on the nucleotide sequence indicate the origins of each portion of the nucleotide sequence.

[0038] FIG. 1-25 shows the nucleotide and amino acid sequences of CDR3 of the Vβ chain of T-cell receptors (TCRs) of WT1-specific cytotoxic T-cells (CTLs) from healthy individuals and HLA-A*2402-positive patients, which sequences have been identified in the present invention. In the figure, “clone #” indicates the clone numbers, the numbers to the left of the dot indicate the family numbers of Vβ chains, and the numbers to the right of the dot indicate the reference numbers. V name, J name, and D name indicate the details of the V region, J region, and D region, respectively. The letters “V-REGION . . . N1 . . . D-REGION . . . (P)N2 . . . J-REGION” on the nucleotide sequence indicate the origins of each portion of the nucleotide sequence.

[0039] FIG. 1-26 shows the nucleotide and amino acid sequences of CDR3 of the Vβ chain of T-cell receptors (TCRs) of WT1-specific cytotoxic T-cells (CTLs) from healthy individuals and HLA-A*2402-positive patients, which sequences have been identified in the present invention. In the figure, “clone #” indicates the clone numbers, the numbers to the left of the dot indicate the family numbers of Vβ chains, and the numbers to the right of the dot indicate the reference numbers. V name, J name, and D name indicate the details of the V region, J region, and D region, respectively. The letters “V-REGION . . . N1 . . . D-REGION . . . (P)N2 . . . J-REGION” on the nucleotide sequence indicate the origins of each portion of the nucleotide sequence.

[0040] FIG. 1-27 shows the nucleotide and amino acid sequences of CDR3 of the Vβ chain of T-cell receptors (TCRs) of WT1-specific cytotoxic T-cells (CTLs) from healthy individuals and HLA-A*2402-positive patients, which sequences have been identified in the present invention. In the figure, “clone #” indicates the clone numbers, the numbers to the left of the dot indicate the family numbers of Vβ chains, and the numbers to the right of the dot indicate the reference numbers. V name, J name, and D name indicate the details of the V region, J region, and D region, respectively. The letters “V-REGION . . . N1 . . . D-REGION . . . (P)N2 . . . J-REGION” on the nucleotide sequence indicate the origins of each portion of the nucleotide sequence.

[0041] FIG. 1-28 shows the nucleotide and amino acid sequences of CDR3 of the Vβ chain of T-cell receptors (TCRs) of WT1-specific cytotoxic T-cells (CTLs) from healthy individuals and HLA-A*2402-positive patients, which sequences have been identified in the present invention. In the figure, “clone #” indicates the clone numbers, the numbers to the left of the dot indicate the family numbers of Vβ chains, and the numbers to the right of the dot indicate the reference numbers. V name, J name, and D name indicate the details of the V region, J region, and D region, respectively. The letters “V-REGION . . . N1 . . . D-REGION . . . (P)N2 . . . J-REGION” on the nucleotide sequence indicate the origins of each portion of the nucleotide sequence.

[0042] FIG. 1-29 shows the nucleotide and amino acid sequences of CDR3 of the Vβ chain of T-cell receptors (TCRs) of WT1-specific cytotoxic T-cells (CTLs) from healthy individuals and HLA-A*2402-positive patients, which sequences have been identified in the present invention. In the figure, “clone #” indicates the clone numbers, the numbers to the left of the dot indicate the family numbers of Vβ chains, and the numbers to the right of the dot indicate the reference numbers. V name, J name, and D name indicate the details of the V region, J region, and D region, respectively. The letters “V-REGION . . . N1 . . . D-REGION . . . (P)N2 . . . J-REGION” on the nucleotide sequence indicate the origins of each portion of the nucleotide sequence.

[0043] FIG. 1-30 shows the nucleotide and amino acid sequences of CDR3 of the Vβ chain of T-cell receptors (TCRs) of WT1-specific cytotoxic T-cells (CTLs) from healthy individuals and HLA-A*2402-positive patients, which sequences have been identified in the present invention. In the figure, “clone #” indicates the clone numbers, the numbers to the left of the dot indicate the family numbers of Vβ chains, and the numbers to the right of the dot indicate the reference numbers. V name, J name, and D name indicate the details of the V region, J region, and D region, respectively. The letters “V-REGION . . . N1 . . . D-REGION . . . (P)N2 . . . J-REGION” on the nucleotide sequence indicate the origins of each portion of the nucleotide sequence.

[0044] FIG. 1-31 shows the nucleotide and amino acid sequences of CDR3 of the Vβ chain of T-cell receptors (TCRs) of WT1-specific cytotoxic T-cells (CTLs) from healthy individuals and HLA-A*2402-positive patients, which sequences have been identified in the present invention. In the figure, “clone #” indicates the clone numbers, the numbers to the left of the dot indicate the family numbers of Vβ chains, and the numbers to the right of the dot indicate the reference numbers. V name, J name, and D name indicate the details of the V region, J region, and D region, respectively. The letters “V-REGION . . . N1 . . . D-REGION . . . (P)N2 . . . J-REGION” on the nucleotide sequence indicate the origins of each portion of the nucleotide sequence.

[0045] FIG. 1-32 shows the nucleotide and amino acid sequences of CDR3 of the Vβ chain of T-cell receptors (TCRs) of WT1-specific cytotoxic T-cells (CTLs) from healthy individuals and HLA-A*2402-positive patients, which sequences have been identified in the present invention. In the figure, “clone #” indicates the clone numbers, the numbers to the left of the dot indicate the family numbers of Vβ chains, and the numbers to the right of the dot indicate the reference numbers. V name, J name, and D name indicate the details of the V region, J region, and D region, respectively. The letters “V-REGION . . . N1 . . . D-REGION . . . (P)N2 . . . J-REGION” on the nucleotide sequence indicate the origins of each portion of the nucleotide sequence.

[0046] FIG. 1-33 shows the nucleotide and amino acid sequences of CDR3 of the Vβ chain of T-cell receptors (TCRs) of WT1-specific cytotoxic T-cells (CTLs) from healthy individuals and HLA-A*2402-positive patients, which sequences have been identified in the present invention. In the figure, “clone #” indicates the clone numbers, the numbers to the left of the dot indicate the family numbers of Vβ chains, and the numbers to the right of the dot indicate the reference numbers. V name, J name, and D name indicate the details of the V region, J region, and D region, respectively. The letters “V-REGION . . . N1 . . . D-REGION . . . (P)N2 . . . J-REGION” on the nucleotide sequence indicate the origins of each portion of the nucleotide sequence.

[0047] FIG. 1-34 shows the nucleotide and amino acid sequences of CDR3 of the Vβ chain of T-cell receptors (TCRs) of WT1-specific cytotoxic T-cells (CTLs) from healthy individuals and HLA-A*2402-positive patients, which sequences have been identified in the present invention. In the figure, “clone #” indicates the clone numbers, the numbers to the left of the dot indicate the family numbers of Vβ chains, and the numbers to the right of the dot indicate the reference numbers. V name, J name, and D name indicate the details of the V region, J region, and D region, respectively. The letters “V-REGION . . . N1 . . . D-REGION . . . (P)N2 . . . J-REGION” on the nucleotide sequence indicate the origins of each portion of the nucleotide sequence.

[0048] FIG. 1-35 shows the nucleotide and amino acid sequences of CDR3 of the Vβ chain of T-cell receptors (TCRs) of WT1-specific cytotoxic T-cells (CTLs) from healthy individuals and HLA-A*2402-positive patients, which sequences have been identified in the present invention. In the figure, “clone #” indicates the clone numbers, the numbers to the left of the dot indicate the family numbers of Vβ chains, and the numbers to the right of the dot indicate the reference numbers. V name, J name, and D name indicate the details of the V region, J region, and D region, respectively. The letters “V-REGION . . . N1 . . . D-REGION . . . (P)N2 . . . J-REGION” on the nucleotide sequence indicate the origins of each portion of the nucleotide sequence.

[0049] FIG. 1-36 shows the nucleotide and amino acid sequences of CDR3 of the Vβ chain of T-cell receptors (TCRs) of WT1-specific cytotoxic T-cells (CTLs) from healthy individuals and HLA-A*2402-positive patients, which sequences have been identified in the present invention. In the figure, “clone #” indicates the clone numbers, the numbers to the left of the dot indicate the family numbers of Vβ chains, and the numbers to the right of the dot indicate the reference numbers. V name, J name, and D name indicate the details of the V region, J region, and D region, respectively. The letters “V-REGION . . . N1 . . . D-REGION . . . (P)N2 . . . J-REGION” on the nucleotide sequence indicate the origins of each portion of the nucleotide sequence.

[0050] FIG. 2-1 shows the clonality of each clone of the WT1-specific cytotoxic T-cells (CTLs) from healthy individuals and HLA-A*2402-positive patients identified in the present invention. In the figure, “clone #” indicates the clone numbers, the numbers to the left of the dot indicate the family numbers of Vβ chains, and the numbers to the right of the dot indicate the reference numbers; HV is healthy volunteers, AML is patients with acute myelocytic leukemia, and MDS is patients with dysmyelopoietic syndrome. The numbers added to these abbreviations are healthy volunteer numbers and patient numbers. HV is healthy volunteers, AML is patients with acute myelocytic leukemia, and MDS is patients with dysmyelopoietic syndrome. The numbers added to these abbreviations are healthy volunteer numbers and patient numbers. Res indicates patients who responded to treatment; and nonRes indicates patients who did not respond to treatment. Further, pre indicates pre-treatment, and 4 w, 8 w, 12 w, and 42 w indicate 4 weeks, 8 weeks, 12 weeks, and 42 weeks, respectively, after the treatment. Phase 1 denotes the first phase of clinical trials. PB(pre) indicates peripheral blood before treatment; and BM(pre) indicates bone marrow before treatment.

[0051] FIG. 2-2 shows the clonality of each clone of the WT1-specific cytotoxic T-cells (CTLs) from healthy individuals and HLA-A*2402-positive patients identified in the present invention. In the figure, “clone #” indicates the clone numbers, the numbers to the left of the dot indicate the family numbers of Vβ chains, and the numbers to the right of the dot indicate the reference numbers; HV is healthy volunteers, AML is patients with acute myelocytic leukemia, and MDS is patients with dysmyelopoietic syndrome. The numbers added to these abbreviations are healthy volunteer numbers and patient numbers. HV is healthy volunteers, AML is patients with acute myelocytic leukemia, and MDS is patients with dysmyelopoietic syndrome. The numbers added to these abbreviations are healthy volunteer numbers and patient numbers. Res indicates patients who responded to treatment; and nonRes indicates patients who did not respond to treatment. Further, pre indicates pre-treatment, and 4 w, 8 w, 12 w, and 42 w indicate 4 weeks, 8 weeks, 12 weeks, and 42 weeks, respectively, after the treatment. Phase 1 denotes the first phase of clinical trials. PB(pre) indicates peripheral blood before treatment; and BM(pre) indicates bone marrow before treatment.

[0052] FIG. 2-3 shows the clonality of each clone of the WT1-specific cytotoxic T-cells (CTLs) from healthy individuals and HLA-A*2402-positive patients identified in the present invention. In the figure, “clone #” indicates the clone numbers, the numbers to the left of the dot indicate the family numbers of Vβ chains, and the numbers to the right of the dot indicate the reference numbers; HV is healthy volunteers, AML is patients with acute myelocytic leukemia, and MDS is patients with dysmyelopoietic syndrome. The numbers added to these abbreviations are healthy volunteer numbers and patient numbers. HV is healthy volunteers, AML is patients with acute myelocytic leukemia, and MDS is patients with dysmyelopoietic syndrome. The numbers added to these abbreviations are healthy volunteer numbers and patient numbers. Res indicates patients who responded to treatment; and nonRes indicates patients who did not respond to treatment. Further, pre indicates pre-treatment, and 4 w, 8 w, 12 w, and 42 w indicate 4 weeks, 8 weeks, 12 weeks, and 42 weeks, respectively, after the treatment. Phase 1 denotes the first phase of clinical trials. PB(pre) indicates peripheral blood before treatment; and BM(pre) indicates bone marrow before treatment.

[0053] FIG. 2-4 shows the clonality of each clone of the WT1-specific cytotoxic T-cells (CTLs) from healthy individuals and HLA-A*2402-positive patients identified in the present invention. In the figure, “clone #” indicates the clone numbers, the numbers to the left of the dot indicate the family numbers of Vβ chains, and the numbers to the right of the dot indicate the reference numbers; HV is healthy volunteers, AML is patients with acute myelocytic leukemia, and MDS is patients with dysmyelopoietic syndrome. The numbers added to these abbreviations are healthy volunteer numbers and patient numbers. HV is healthy volunteers, AML is patients with acute myelocytic leukemia, and MDS is patients with dysmyelopoietic syndrome. The numbers added to these abbreviations are healthy volunteer numbers and patient numbers. Res indicates patients who responded to treatment; and nonRes indicates patients who did not respond to treatment. Further, pre indicates pre-treatment, and 4 w, 8 w, 12 w, and 42 w indicate 4 weeks, 8 weeks, 12 weeks, and 42 weeks, respectively, after the treatment. Phase 1 denotes the first phase of clinical trials. PB(pre) indicates peripheral blood before treatment; and BM(pre) indicates bone marrow before treatment.

[0054] FIG. 2-5 shows the clonality of each clone of the WT1-specific cytotoxic T-cells (CTLs) from healthy individuals and HLA-A*2402-positive patients identified in the present invention. In the figure, “clone #” indicates the clone numbers, the numbers to the left of the dot indicate the family numbers of Vβ chains, and the numbers to the right of the dot indicate the reference numbers; HV is healthy volunteers, AML is patients with acute myelocytic leukemia, and MDS is patients with dysmyelopoietic syndrome. The numbers added to these abbreviations are healthy volunteer numbers and patient numbers. HV is healthy volunteers, AML is patients with acute myelocytic leukemia, and MDS is patients with dysmyelopoietic syndrome. The numbers added to these abbreviations are healthy volunteer numbers and patient numbers. Res indicates patients who responded to treatment; and nonRes indicates patients who did not respond to treatment. Further, pre indicates pre-treatment, and 4 w, 8 w, 12 w, and 42 w indicate 4 weeks, 8 weeks, 12 weeks, and 42 weeks, respectively, after the treatment. Phase 1 denotes the first phase of clinical trials. PB(pre) indicates peripheral blood before treatment; and BM(pre) indicates bone marrow before treatment.

[0055] FIG. 2-6 shows the clonality of each clone of the WT1-specific cytotoxic T-cells (CTLs) from healthy individuals and HLA-A*2402-positive patients identified in the present invention. In the figure, “clone #” indicates the clone numbers, the numbers to the left of the dot indicate the family numbers of Vβ chains, and the numbers to the right of the dot indicate the reference numbers; HV is healthy volunteers, AML is patients with acute myelocytic leukemia, and MDS is patients with dysmyelopoietic syndrome. The numbers added to these abbreviations are healthy volunteer numbers and patient numbers. HV is healthy volunteers, AML is patients with acute myelocytic leukemia, and MDS is patients with dysmyelopoietic syndrome. The numbers added to these abbreviations are healthy volunteer numbers and patient numbers. Res indicates patients who responded to treatment; and nonRes indicates patients who did not respond to treatment. Further, pre indicates pre-treatment, and 4 w, 8 w, 12 w, and 42 w indicate 4 weeks, 8 weeks, 12 weeks, and 42 weeks, respectively, after the treatment. Phase 1 denotes the first phase of clinical trials. PB(pre) indicates peripheral blood before treatment; and BM(pre) indicates bone marrow before treatment.

[0056] FIG. 2-7 shows the clonality of each clone of the WT1-specific cytotoxic T-cells (CTLs) from healthy individuals and HLA-A*2402-positive patients identified in the present invention. In the figure, “clone #” indicates the clone numbers, the numbers to the left of the dot indicate the family numbers of Vβ chains, and the numbers to the right of the dot indicate the reference numbers; HV is healthy volunteers, AML is patients with acute myelocytic leukemia, and MDS is patients with dysmyelopoietic syndrome. The numbers added to these abbreviations are healthy volunteer numbers and patient numbers. HV is healthy volunteers, AML is patients with acute myelocytic leukemia, and MDS is patients with dysmyelopoietic syndrome. The numbers added to these abbreviations are healthy volunteer numbers and patient numbers. Res indicates patients who responded to treatment; and nonRes indicates patients who did not respond to treatment. Further, pre indicates pre-treatment, and 4 w, 8 w, 12 w, and 42 w indicate 4 weeks, 8 weeks, 12 weeks, and 42 weeks, respectively, after the treatment. Phase 1 denotes the first phase of clinical trials. PB(pre) indicates peripheral blood before treatment; and BM(pre) indicates bone marrow before treatment.

[0057] FIG. 2-8 shows the clonality of each clone of the WT1-specific cytotoxic T-cells (CTLs) from healthy individuals and HLA-A*2402-positive patients identified in the present invention. In the figure, “clone #” indicates the clone numbers, the numbers to the left of the dot indicate the family numbers of Vβ chains, and the numbers to the right of the dot indicate the reference numbers; HV is healthy volunteers, AML is patients with acute myelocytic leukemia, and MDS is patients with dysmyelopoietic syndrome. The numbers added to these abbreviations are healthy volunteer numbers and patient numbers. HV is healthy volunteers, AML is patients with acute myelocytic leukemia, and MDS is patients with dysmyelopoietic syndrome. The numbers added to these abbreviations are healthy volunteer numbers and patient numbers. Res indicates patients who responded to treatment; and nonRes indicates patients who did not respond to treatment. Further, pre indicates pre-treatment, and 4 w, 8 w, 12 w, and 42 w indicate 4 weeks, 8 weeks, 12 weeks, and 42 weeks, respectively, after the treatment. Phase 1 denotes the first phase of clinical trials. PB(pre) indicates peripheral blood before treatment; and BM(pre) indicates bone marrow before treatment.

[0058] FIG. 2-9 shows the clonality of each clone of the WT1-specific cytotoxic T-cells (CTLs) from healthy individuals and HLA-A*2402-positive patients identified in the present invention. In the figure, “clone #” indicates the clone numbers, the numbers to the left of the dot indicate the family numbers of Vβ chains, and the numbers to the right of the dot indicate the reference numbers; HV is healthy volunteers, AML is patients with acute myelocytic leukemia, and MDS is patients with dysmyelopoietic syndrome. The numbers added to these abbreviations are healthy volunteer numbers and patient numbers. HV is healthy volunteers, AML is patients with acute myelocytic leukemia, and MDS is patients with dysmyelopoietic syndrome. The numbers added to these abbreviations are healthy volunteer numbers and patient numbers. Res indicates patients who responded to treatment; and nonRes indicates patients who did not respond to treatment. Further, pre indicates pre-treatment, and 4 w, 8 w, 12 w, and 42 w indicate 4 weeks, 8 weeks, 12 weeks, and 42 weeks, respectively, after the treatment. Phase 1 denotes the first phase of clinical trials. PB(pre) indicates peripheral blood before treatment; and BM(pre) indicates bone marrow before treatment.

[0059] FIG. 2-10 shows the clonality of each clone of the WT1-specific cytotoxic T-cells (CTLs) from healthy individuals and HLA-A*2402-positive patients identified in the present invention. In the figure, “clone #” indicates the clone numbers, the numbers to the left of the dot indicate the family numbers of Vβ chains, and the numbers to the right of the dot indicate the reference numbers; HV is healthy volunteers, AML is patients with acute myelocytic leukemia, and MDS is patients with dysmyelopoietic syndrome. The numbers added to these abbreviations are healthy volunteer numbers and patient numbers. HV is healthy volunteers, AML is patients with acute myelocytic leukemia, and MDS is patients with dysmyelopoietic syndrome. The numbers added to these abbreviations are healthy volunteer numbers and patient numbers. Res indicates patients who responded to treatment; and nonRes indicates patients who did not respond to treatment. Further, pre indicates pre-treatment, and 4 w, 8 w, 12 w, and 42 w indicate 4 weeks, 8 weeks, 12 weeks, and 42 weeks, respectively, after the treatment. Phase 1 denotes the first phase of clinical trials. PB(pre) indicates peripheral blood before treatment; and BM(pre) indicates bone marrow before treatment.

[0060] FIG. 2-11 shows the clonality of each clone of the WT1-specific cytotoxic T-cells (CTLs) from healthy individuals and HLA-A*2402-positive patients identified in the present invention. In the figure, “clone #” indicates the clone numbers, the numbers to the left of the dot indicate the family numbers of Vβ chains, and the numbers to the right of the dot indicate the reference numbers; HV is healthy volunteers, AML is patients with acute myelocytic leukemia, and MDS is patients with dysmyelopoietic syndrome. The numbers added to these abbreviations are healthy volunteer numbers and patient numbers. HV is healthy volunteers, AML is patients with acute myelocytic leukemia, and MDS is patients with dysmyelopoietic syndrome. The numbers added to these abbreviations are healthy volunteer numbers and patient numbers. Res indicates patients who responded to treatment; and nonRes indicates patients who did not respond to treatment. Further, pre indicates pre-treatment, and 4 w, 8 w, 12 w, and 42 w indicate 4 weeks, 8 weeks, 12 weeks, and 42 weeks, respectively, after the treatment. Phase 1 denotes the first phase of clinical trials. PB(pre) indicates peripheral blood before treatment; and BM(pre) indicates bone marrow before treatment.

[0061] FIG. 2-12 shows the clonality of each clone of the WT1-specific cytotoxic T-cells (CTLs) from healthy individuals and HLA-A*2402-positive patients identified in the present invention. In the figure, “clone #” indicates the clone numbers, the numbers to the left of the dot indicate the family numbers of Vβ chains, and the numbers to the right of the dot indicate the reference numbers; HV is healthy volunteers, AML is patients with acute myelocytic leukemia, and MDS is patients with dysmyelopoietic syndrome. The numbers added to these abbreviations are healthy volunteer numbers and patient numbers. HV is healthy volunteers, AML is patients with acute myelocytic leukemia, and MDS is patients with dysmyelopoietic syndrome. The numbers added to these abbreviations are healthy volunteer numbers and patient numbers. Res indicates patients who responded to treatment; and nonRes indicates patients who did not respond to treatment. Further, pre indicates pre-treatment, and 4 w, 8 w, 12 w, and 42 w indicate 4 weeks, 8 weeks, 12 weeks, and 42 weeks, respectively, after the treatment. Phase 1 denotes the first phase of clinical trials. PB(pre) indicates peripheral blood before treatment; and BM(pre) indicates bone marrow before treatment.

[0062] FIG. 2-13 shows the clonality of each clone of the WT1-specific cytotoxic T-cells (CTLs) from healthy individuals and HLA-A*2402-positive patients identified in the present invention. In the figure, “clone #” indicates the clone numbers, the numbers to the left of the dot indicate the family numbers of Vβ chains, and the numbers to the right of the dot indicate the reference numbers; HV is healthy volunteers, AML is patients with acute myelocytic leukemia, and MDS is patients with dysmyelopoietic syndrome. The numbers added to these abbreviations are healthy volunteer numbers and patient numbers. HV is healthy volunteers, AML is patients with acute myelocytic leukemia, and MDS is patients with dysmyelopoietic syndrome. The numbers added to these abbreviations are healthy volunteer numbers and patient numbers. Res indicates patients who responded to treatment; and nonRes indicates patients who did not respond to treatment. Further, pre indicates pre-treatment, and 4 w, 8 w, 12 w, and 42 w indicate 4 weeks, 8 weeks, 12 weeks, and 42 weeks, respectively, after the treatment. Phase 1 denotes the first phase of clinical trials. PB(pre) indicates peripheral blood before treatment; and BM(pre) indicates bone marrow before treatment.

[0063] FIG. 2-14 shows the clonality of each clone of the WT1-specific cytotoxic T-cells (CTLs) from healthy individuals and HLA-A*2402-positive patients identified in the present invention. In the figure, “clone #” indicates the clone numbers, the numbers to the left of the dot indicate the family numbers of Vβ chains, and the numbers to the right of the dot indicate the reference numbers; HV is healthy volunteers, AML is patients with acute myelocytic leukemia, and MDS is patients with dysmyelopoietic syndrome. The numbers added to these abbreviations are healthy volunteer numbers and patient numbers. HV is healthy volunteers, AML is patients with acute myelocytic leukemia, and MDS is patients with dysmyelopoietic syndrome. The numbers added to these abbreviations are healthy volunteer numbers and patient numbers. Res indicates patients who responded to treatment; and nonRes indicates patients who did not respond to treatment. Further, pre indicates pre-treatment, and 4 w, 8 w, 12 w, and 42 w indicate 4 weeks, 8 weeks, 12 weeks, and 42 weeks, respectively, after the treatment. Phase 1 denotes the first phase of clinical trials. PB(pre) indicates peripheral blood before treatment; and BM(pre) indicates bone marrow before treatment.

[0064] FIG. 2-15 shows the clonality of each clone of the WT1-specific cytotoxic T-cells (CTLs) from healthy individuals and HLA-A*2402-positive patients identified in the present invention. In the figure, “clone #” indicates the clone numbers, the numbers to the left of the dot indicate the family numbers of Vβ chains, and the numbers to the right of the dot indicate the reference numbers; HV is healthy volunteers, AML is patients with acute myelocytic leukemia, and MDS is patients with dysmyelopoietic syndrome. The numbers added to these abbreviations are healthy volunteer numbers and patient numbers. HV is healthy volunteers, AML is patients with acute myelocytic leukemia, and MDS is patients with dysmyelopoietic syndrome. The numbers added to these abbreviations are healthy volunteer numbers and patient numbers. Res indicates patients who responded to treatment; and nonRes indicates patients who did not respond to treatment. Further, pre indicates pre-treatment, and 4 w, 8 w, 12 w, and 42 w indicate 4 weeks, 8 weeks, 12 weeks, and 42 weeks, respectively, after the treatment. Phase 1 denotes the first phase of clinical trials. PB(pre) indicates peripheral blood before treatment; and BM(pre) indicates bone marrow before treatment.

[0065] FIG. 2-16 shows the clonality of each clone of the WT1-specific cytotoxic T-cells (CTLs) from healthy individuals and HLA-A*2402-positive patients identified in the present invention. In the figure, “clone #” indicates the clone numbers, the numbers to the left of the dot indicate the family numbers of Vβ chains, and the numbers to the right of the dot indicate the reference numbers; HV is healthy volunteers, AML is patients with acute myelocytic leukemia, and MDS is patients with dysmyelopoietic syndrome. The numbers added to these abbreviations are healthy volunteer numbers and patient numbers. HV is healthy volunteers, AML is patients with acute myelocytic leukemia, and MDS is patients with dysmyelopoietic syndrome. The numbers added to these abbreviations are healthy volunteer numbers and patient numbers. Res indicates patients who responded to treatment; and nonRes indicates patients who did not respond to treatment. Further, pre indicates pre-treatment, and 4 w, 8 w, 12 w, and 42 w indicate 4 weeks, 8 weeks, 12 weeks, and 42 weeks, respectively, after the treatment. Phase 1 denotes the first phase of clinical trials. PB(pre) indicates peripheral blood before treatment; and BM(pre) indicates bone marrow before treatment.

[0066] FIG. 2-17 shows the clonality of each clone of the WT1-specific cytotoxic T-cells (CTLs) from healthy individuals and HLA-A*2402-positive patients identified in the present invention. In the figure, “clone #” indicates the clone numbers, the numbers to the left of the dot indicate the family numbers of Vβ chains, and the numbers to the right of the dot indicate the reference numbers; HV is healthy volunteers, AML is patients with acute myelocytic leukemia, and MDS is patients with dysmyelopoietic syndrome. The numbers added to these abbreviations are healthy volunteer numbers and patient numbers. HV is healthy volunteers, AML is patients with acute myelocytic leukemia, and MDS is patients with dysmyelopoietic syndrome. The numbers added to these abbreviations are healthy volunteer numbers and patient numbers. Res indicates patients who responded to treatment; and nonRes indicates patients who did not respond to treatment. Further, pre indicates pre-treatment, and 4 w, 8 w, 12 w, and 42 w indicate 4 weeks, 8 weeks, 12 weeks, and 42 weeks, respectively, after the treatment. Phase 1 denotes the first phase of clinical trials. PB(pre) indicates peripheral blood before treatment; and BM(pre) indicates bone marrow before treatment.

[0067] FIG. 2-18 shows the clonality of each clone of the WT1-specific cytotoxic T-cells (CTLs) from healthy individuals and HLA-A*2402-positive patients identified in the present invention. In the figure, “clone #” indicates the clone numbers, the numbers to the left of the dot indicate the family numbers of Vβ chains, and the numbers to the right of the dot indicate the reference numbers; HV is healthy volunteers, AML is patients with acute myelocytic leukemia, and MDS is patients with dysmyelopoietic syndrome. The numbers added to these abbreviations are healthy volunteer numbers and patient numbers. HV is healthy volunteers, AML is patients with acute myelocytic leukemia, and MDS is patients with dysmyelopoietic syndrome. The numbers added to these abbreviations are healthy volunteer numbers and patient numbers. Res indicates patients who responded to treatment; and nonRes indicates patients who did not respond to treatment. Further, pre indicates pre-treatment, and 4 w, 8 w, 12 w, and 42 w indicate 4 weeks, 8 weeks, 12 weeks, and 42 weeks, respectively, after the treatment. Phase 1 denotes the first phase of clinical trials. PB(pre) indicates peripheral blood before treatment; and BM(pre) indicates bone marrow before treatment.

[0068] FIG. 2-19 shows the clonality of each clone of the WT1-specific cytotoxic T-cells (CTLs) from healthy individuals and HLA-A*2402-positive patients identified in the present invention. In the figure, “clone #” indicates the clone numbers, the numbers to the left of the dot indicate the family numbers of Vβ chains, and the numbers to the right of the dot indicate the reference numbers; HV is healthy volunteers, AML is patients with acute myelocytic leukemia, and MDS is patients with dysmyelopoietic syndrome. The numbers added to these abbreviations are healthy volunteer numbers and patient numbers. HV is healthy volunteers, AML is patients with acute myelocytic leukemia, and MDS is patients with dysmyelopoietic syndrome. The numbers added to these abbreviations are healthy volunteer numbers and patient numbers. Res indicates patients who responded to treatment; and nonRes indicates patients who did not respond to treatment. Further, pre indicates pre-treatment, and 4 w, 8 w, 12 w, and 42 w indicate 4 weeks, 8 weeks, 12 weeks, and 42 weeks, respectively, after the treatment. Phase 1 denotes the first phase of clinical trials. PB(pre) indicates peripheral blood before treatment; and BM(pre) indicates bone marrow before treatment.

[0069] FIG. 2-20 shows the clonality of each clone of the WT1-specific cytotoxic T-cells (CTLs) from healthy individuals and HLA-A*2402-positive patients identified in the present invention. In the figure, “clone #” indicates the clone numbers, the numbers to the left of the dot indicate the family numbers of Vβ chains, and the numbers to the right of the dot indicate the reference numbers; HV is healthy volunteers, AML is patients with acute myelocytic leukemia, and MDS is patients with dysmyelopoietic syndrome. The numbers added to these abbreviations are healthy volunteer numbers and patient numbers. HV is healthy volunteers, AML is patients with acute myelocytic leukemia, and MDS is patients with dysmyelopoietic syndrome. The numbers added to these abbreviations are healthy volunteer numbers and patient numbers. Res indicates patients who responded to treatment; and nonRes indicates patients who did not respond to treatment. Further, pre indicates pre-treatment, and 4 w, 8 w, 12 w, and 42 w indicate 4 weeks, 8 weeks, 12 weeks, and 42 weeks, respectively, after the treatment. Phase 1 denotes the first phase of clinical trials. PB(pre) indicates peripheral blood before treatment; and BM(pre) indicates bone marrow before treatment.

[0070] FIG. 2-21 shows the clonality of each clone of the WT1-specific cytotoxic T-cells (CTLs) from healthy individuals and HLA-A*2402-positive patients identified in the present invention. In the figure, “clone #” indicates the clone numbers, the numbers to the left of the dot indicate the family numbers of Vβ chains, and the numbers to the right of the dot indicate the reference numbers; HV is healthy volunteers, AML is patients with acute myelocytic leukemia, and MDS is patients with dysmyelopoietic syndrome. The numbers added to these abbreviations are healthy volunteer numbers and patient numbers. HV is healthy volunteers, AML is patients with acute myelocytic leukemia, and MDS is patients with dysmyelopoietic syndrome. The numbers added to these abbreviations are healthy volunteer numbers and patient numbers. Res indicates patients who responded to treatment; and nonRes indicates patients who did not respond to treatment. Further, pre indicates pre-treatment, and 4 w, 8 w, 12 w, and 42 w indicate 4 weeks, 8 weeks, 12 weeks, and 42 weeks, respectively, after the treatment. Phase 1 denotes the first phase of clinical trials. PB(pre) indicates peripheral blood before treatment; and BM(pre) indicates bone marrow before treatment.

[0071] FIG. 2-22 shows the clonality of each clone of the WT1-specific cytotoxic T-cells (CTLs) from healthy individuals and HLA-A*2402-positive patients identified in the present invention. In the figure, “clone #” indicates the clone numbers, the numbers to the left of the dot indicate the family numbers of Vβ chains, and the numbers to the right of the dot indicate the reference numbers; HV is healthy volunteers, AML is patients with acute myelocytic leukemia, and MDS is patients with dysmyelopoietic syndrome. The numbers added to these abbreviations are healthy volunteer numbers and patient numbers. HV is healthy volunteers, AML is patients with acute myelocytic leukemia, and MDS is patients with dysmyelopoietic syndrome. The numbers added to these abbreviations are healthy volunteer numbers and patient numbers. Res indicates patients who responded to treatment; and nonRes indicates patients who did not respond to treatment. Further, pre indicates pre-treatment, and 4 w, 8 w, 12 w, and 42 w indicate 4 weeks, 8 weeks, 12 weeks, and 42 weeks, respectively, after the treatment.

[0072] Phase 1 denotes the first phase of clinical trials. PB(pre) indicates peripheral blood before treatment; and BM(pre) indicates bone marrow before treatment.

[0073] FIG. 2-23 shows the clonality of each clone of the WT1-specific cytotoxic T-cells (CTLs) from healthy individuals and HLA-A*2402-positive patients identified in the present invention. In the figure, “clone #” indicates the clone numbers, the numbers to the left of the dot indicate the family numbers of Vβ chains, and the numbers to the right of the dot indicate the reference numbers; HV is healthy volunteers, AML is patients with acute myelocytic leukemia, and MDS is patients with dysmyelopoietic syndrome. The numbers added to these abbreviations are healthy volunteer numbers and patient numbers. HV is healthy volunteers, AML is patients with acute myelocytic leukemia, and MDS is patients with dysmyelopoietic syndrome. The numbers added to these abbreviations are healthy volunteer numbers and patient numbers. Res indicates patients who responded to treatment; and nonRes indicates patients who did not respond to treatment. Further, pre indicates pre-treatment, and 4 w, 8 w, 12 w, and 42 w indicate 4 weeks, 8 weeks, 12 weeks, and 42 weeks, respectively, after the treatment. Phase 1 denotes the first phase of clinical trials. PB(pre) indicates peripheral blood before treatment; and BM(pre) indicates bone marrow before treatment.

[0074] FIG. 2-24 shows the clonality of each clone of the WT1-specific cytotoxic T-cells (CTLs) from healthy individuals and HLA-A*2402-positive patients identified in the present invention. In the figure, “clone #” indicates the clone numbers, the numbers to the left of the dot indicate the family numbers of Vβ chains, and the numbers to the right of the dot indicate the reference numbers; HV is healthy volunteers, AML is patients with acute myelocytic leukemia, and MDS is patients with dysmyelopoietic syndrome. The numbers added to these abbreviations are healthy volunteer numbers and patient numbers. HV is healthy volunteers, AML is patients with acute myelocytic leukemia, and MDS is patients with dysmyelopoietic syndrome. The numbers added to these abbreviations are healthy volunteer numbers and patient numbers. Res indicates patients who responded to treatment; and nonRes indicates patients who did not respond to treatment. Further, pre indicates pre-treatment, and 4 w, 8 w, 12 w, and 42 w indicate 4 weeks, 8 weeks, 12 weeks, and 42 weeks, respectively, after the treatment. Phase 1 denotes the first phase of clinical trials. PB(pre) indicates peripheral blood before treatment; and BM(pre) indicates bone marrow before treatment.

[0075] FIG. 2-25 shows the clonality of each clone of the WT1-specific cytotoxic T-cells (CTLs) from healthy individuals and HLA-A*2402-positive patients identified in the present invention. In the figure, “clone #” indicates the clone numbers, the numbers to the left of the dot indicate the family numbers of Vβ chains, and the numbers to the right of the dot indicate the reference numbers; HV is healthy volunteers, AML is patients with acute myelocytic leukemia, and MDS is patients with dysmyelopoietic syndrome. The numbers added to these abbreviations are healthy volunteer numbers and patient numbers. HV is healthy volunteers, AML is patients with acute myelocytic leukemia, and MDS is patients with dysmyelopoietic syndrome. The numbers added to these abbreviations are healthy volunteer numbers and patient numbers. Res indicates patients who responded to treatment; and nonRes indicates patients who did not respond to treatment. Further, pre indicates pre-treatment, and 4 w, 8 w, 12 w, and 42 w indicate 4 weeks, 8 weeks, 12 weeks, and 42 weeks, respectively, after the treatment. Phase 1 denotes the first phase of clinical trials. PB(pre) indicates peripheral blood before treatment; and BM(pre) indicates bone marrow before treatment.

[0076] FIG. 2-26 shows the clonality of each clone of the WT1-specific cytotoxic T-cells (CTLs) from healthy individuals and HLA-A*2402-positive patients identified in the present invention. In the figure, “clone #” indicates the clone numbers, the numbers to the left of the dot indicate the family numbers of Vβ chains, and the numbers to the right of the dot indicate the reference numbers; HV is healthy volunteers, AML is patients with acute myelocytic leukemia, and MDS is patients with dysmyelopoietic syndrome. The numbers added to these abbreviations are healthy volunteer numbers and patient numbers. HV is healthy volunteers, AML is patients with acute myelocytic leukemia, and MDS is patients with dysmyelopoietic syndrome. The numbers added to these abbreviations are healthy volunteer numbers and patient numbers. Res indicates patients who responded to treatment; and nonRes indicates patients who did not respond to treatment. Further, pre indicates pre-treatment, and 4 w, 8 w, 12 w, and 42 w indicate 4 weeks, 8 weeks, 12 weeks, and 42 weeks, respectively, after the treatment. Phase 1 denotes the first phase of clinical trials. PB(pre) indicates peripheral blood before treatment; and BM(pre) indicates bone marrow before treatment.

[0077] FIG. 2-27 shows the clonality of each clone of the WT1-specific cytotoxic T-cells (CTLs) from healthy individuals and HLA-A*2402-positive patients identified in the present invention. In the figure, “clone #” indicates the clone numbers, the numbers to the left of the dot indicate the family numbers of Vβ chains, and the numbers to the right of the dot indicate the reference numbers; HV is healthy volunteers, AML is patients with acute myelocytic leukemia, and MDS is patients with dysmyelopoietic syndrome. The numbers added to these abbreviations are healthy volunteer numbers and patient numbers. HV is healthy volunteers, AML is patients with acute myelocytic leukemia, and MDS is patients with dysmyelopoietic syndrome. The numbers added to these abbreviations are healthy volunteer numbers and patient numbers. Res indicates patients who responded to treatment; and nonRes indicates patients who did not respond to treatment. Further, pre indicates pre-treatment, and 4 w, 8 w, 12 w, and 42 w indicate 4 weeks, 8 weeks, 12 weeks, and 42 weeks, respectively, after the treatment. Phase 1 denotes the first phase of clinical trials. PB(pre) indicates peripheral blood before treatment; and BM(pre) indicates bone marrow before treatment.

[0078] FIG. 2-28 shows the clonality of each clone of the WT1-specific cytotoxic T-cells (CTLs) from healthy individuals and HLA-A*2402-positive patients identified in the present invention. In the figure, “clone #” indicates the clone numbers, the numbers to the left of the dot indicate the family numbers of Vβ chains, and the numbers to the right of the dot indicate the reference numbers; HV is healthy volunteers, AML is patients with acute myelocytic leukemia, and MDS is patients with dysmyelopoietic syndrome. The numbers added to these abbreviations are healthy volunteer numbers and patient numbers. HV is healthy volunteers, AML is patients with acute myelocytic leukemia, and MDS is patients with dysmyelopoietic syndrome. The numbers added to these abbreviations are healthy volunteer numbers and patient numbers. Res indicates patients who responded to treatment; and nonRes indicates patients who did not respond to treatment. Further, pre indicates pre-treatment, and 4 w, 8 w, 12 w, and 42 w indicate 4 weeks, 8 weeks, 12 weeks, and 42 weeks, respectively, after the treatment. Phase 1 denotes the first phase of clinical trials. PB(pre) indicates peripheral blood before treatment; and BM(pre) indicates bone marrow before treatment.

[0079] FIG. 2-29 shows the clonality of each clone of the WT1-specific cytotoxic T-cells (CTLs) from healthy individuals and HLA-A*2402-positive patients identified in the present invention. In the figure, “clone #” indicates the clone numbers, the numbers to the left of the dot indicate the family numbers of Vβ chains, and the numbers to the right of the dot indicate the reference numbers; HV is healthy volunteers, AML is patients with acute myelocytic leukemia, and MDS is patients with dysmyelopoietic syndrome. The numbers added to these abbreviations are healthy volunteer numbers and patient numbers. HV is healthy volunteers, AML is patients with acute myelocytic leukemia, and MDS is patients with dysmyelopoietic syndrome. The numbers added to these abbreviations are healthy volunteer numbers and patient numbers. Res indicates patients who responded to treatment; and nonRes indicates patients who did not respond to treatment. Further, pre indicates pre-treatment, and 4 w, 8 w, 12 w, and 42 w indicate 4 weeks, 8 weeks, 12 weeks, and 42 weeks, respectively, after the treatment. Phase 1 denotes the first phase of clinical trials. PB(pre) indicates peripheral blood before treatment; and BM(pre) indicates bone marrow before treatment.

[0080] FIG. 2-30 shows the clonality of each clone of the WT1-specific cytotoxic T-cells (CTLs) from healthy individuals and HLA-A*2402-positive patients identified in the present invention. In the figure, “clone #” indicates the clone numbers, the numbers to the left of the dot indicate the family numbers of Vβ chains, and the numbers to the right of the dot indicate the reference numbers; HV is healthy volunteers, AML is patients with acute myelocytic leukemia, and MDS is patients with dysmyelopoietic syndrome. The numbers added to these abbreviations are healthy volunteer numbers and patient numbers. HV is healthy volunteers, AML is patients with acute myelocytic leukemia, and MDS is patients with dysmyelopoietic syndrome. The numbers added to these abbreviations are healthy volunteer numbers and patient numbers. Res indicates patients who responded to treatment; and nonRes indicates patients who did not respond to treatment. Further, pre indicates pre-treatment, and 4 w, 8 w, 12 w, and 42 w indicate 4 weeks, 8 weeks, 12 weeks, and 42 weeks, respectively, after the treatment. Phase 1 denotes the first phase of clinical trials. PB(pre) indicates peripheral blood before treatment; and BM(pre) indicates bone marrow before treatment.

[0081] FIG. 2-31 shows the clonality of each clone of the WT1-specific cytotoxic T-cells (CTLs) from healthy individuals and HLA-A*2402-positive patients identified in the present invention. In the figure, “clone #” indicates the clone numbers, the numbers to the left of the dot indicate the family numbers of Vβ chains, and the numbers to the right of the dot indicate the reference numbers; HV is healthy volunteers, AML is patients with acute myelocytic leukemia, and MDS is patients with dysmyelopoietic syndrome. The numbers added to these abbreviations are healthy volunteer numbers and patient numbers. HV is healthy volunteers, AML is patients with acute myelocytic leukemia, and MDS is patients with dysmyelopoietic syndrome. The numbers added to these abbreviations are healthy volunteer numbers and patient numbers. Res indicates patients who responded to treatment; and nonRes indicates patients who did not respond to treatment. Further, pre indicates pre-treatment, and 4 w, 8 w, 12 w, and 42 w indicate 4 weeks, 8 weeks, 12 weeks, and 42 weeks, respectively, after the treatment. Phase 1 denotes the first phase of clinical trials. PB(pre) indicates peripheral blood before treatment; and BM(pre) indicates bone marrow before treatment.

[0082] FIG. 2-32 shows the clonality of each clone of the WT1-specific cytotoxic T-cells (CTLs) from healthy individuals and HLA-A*2402-positive patients identified in the present invention. In the figure, “clone #” indicates the clone numbers, the numbers to the left of the dot indicate the family numbers of Vβ chains, and the numbers to the right of the dot indicate the reference numbers; HV is healthy volunteers, AML is patients with acute myelocytic leukemia, and MDS is patients with dysmyelopoietic syndrome. The numbers added to these abbreviations are healthy volunteer numbers and patient numbers. HV is healthy volunteers, AML is patients with acute myelocytic leukemia, and MDS is patients with dysmyelopoietic syndrome. The numbers added to these abbreviations are healthy volunteer numbers and patient numbers. Res indicates patients who responded to treatment; and nonRes indicates patients who did not respond to treatment. Further, pre indicates pre-treatment, and 4 w, 8 w, 12 w, and 42 w indicate 4 weeks, 8 weeks, 12 weeks, and 42 weeks, respectively, after the treatment.

[0083] Phase 1 denotes the first phase of clinical trials. PB(pre) indicates peripheral blood before treatment; and BM(pre) indicates bone marrow before treatment.

[0084] FIG. 2-33 shows the clonality of each clone of the WT1-specific cytotoxic T-cells (CTLs) from healthy individuals and HLA-A*2402-positive patients identified in the present invention. In the figure, “clone #” indicates the clone numbers, the numbers to the left of the dot indicate the family numbers of Vβ chains, and the numbers to the right of the dot indicate the reference numbers; HV is healthy volunteers, AML is patients with acute myelocytic leukemia, and MDS is patients with dysmyelopoietic syndrome. The numbers added to these abbreviations are healthy volunteer numbers and patient numbers. HV is healthy volunteers, AML is patients with acute myelocytic leukemia, and MDS is patients with dysmyelopoietic syndrome. The numbers added to these abbreviations are healthy volunteer numbers and patient numbers. Res indicates patients who responded to treatment; and nonRes indicates patients who did not respond to treatment. Further, pre indicates pre-treatment, and 4 w, 8 w, 12 w, and 42 w indicate 4 weeks, 8 weeks, 12 weeks, and 42 weeks, respectively, after the treatment. Phase 1 denotes the first phase of clinical trials. PB(pre) indicates peripheral blood before treatment; and BM(pre) indicates bone marrow before treatment.

[0085] FIG. 2-34 shows the clonality of each clone of the WT1-specific cytotoxic T-cells (CTLs) from healthy individuals and HLA-A*2402-positive patients identified in the present invention. In the figure, “clone #” indicates the clone numbers, the numbers to the left of the dot indicate the family numbers of Vβ chains, and the numbers to the right of the dot indicate the reference numbers; HV is healthy volunteers, AML is patients with acute myelocytic leukemia, and MDS is patients with dysmyelopoietic syndrome. The numbers added to these abbreviations are healthy volunteer numbers and patient numbers. HV is healthy volunteers, AML is patients with acute myelocytic leukemia, and MDS is patients with dysmyelopoietic syndrome. The numbers added to these abbreviations are healthy volunteer numbers and patient numbers. Res indicates patients who responded to treatment; and nonRes indicates patients who did not respond to treatment. Further, pre indicates pre-treatment, and 4 w, 8 w, 12 w, and 42 w indicate 4 weeks, 8 weeks, 12 weeks, and 42 weeks, respectively, after the treatment. Phase 1 denotes the first phase of clinical trials. PB(pre) indicates peripheral blood before treatment; and BM(pre) indicates bone marrow before treatment.

[0086] FIG. 2-35 shows the clonality of each clone of the WT1-specific cytotoxic T-cells (CTLs) from healthy individuals and HLA-A*2402-positive patients identified in the present invention. In the figure, “clone #” indicates the clone numbers, the numbers to the left of the dot indicate the family numbers of Vβ chains, and the numbers to the right of the dot indicate the reference numbers; HV is healthy volunteers, AML is patients with acute myelocytic leukemia, and MDS is patients with dysmyelopoietic syndrome. The numbers added to these abbreviations are healthy volunteer numbers and patient numbers. HV is healthy volunteers, AML is patients with acute myelocytic leukemia, and MDS is patients with dysmyelopoietic syndrome. The numbers added to these abbreviations are healthy volunteer numbers and patient numbers. Res indicates patients who responded to treatment; and nonRes indicates patients who did not respond to treatment. Further, pre indicates pre-treatment, and 4 w, 8 w, 12 w, and 42 w indicate 4 weeks, 8 weeks, 12 weeks, and 42 weeks, respectively, after the treatment. Phase 1 denotes the first phase of clinical trials. PB(pre) indicates peripheral blood before treatment; and BM(pre) indicates bone marrow before treatment.

[0087] FIG. 2-36 shows the clonality of each clone of the WT1-specific cytotoxic T-cells (CTLs) from healthy individuals and HLA-A*2402-positive patients identified in the present invention. In the figure, “clone #” indicates the clone numbers, the numbers to the left of the dot indicate the family numbers of Vβ chains, and the numbers to the right of the dot indicate the reference numbers; HV is healthy volunteers, AML is patients with acute myelocytic leukemia, and MDS is patients with dysmyelopoietic syndrome. The numbers added to these abbreviations are healthy volunteer numbers and patient numbers. HV is healthy volunteers, AML is patients with acute myelocytic leukemia, and MDS is patients with dysmyelopoietic syndrome. The numbers added to these abbreviations are healthy volunteer numbers and patient numbers. Res indicates patients who responded to treatment; and nonRes indicates patients who did not respond to treatment. Further, pre indicates pre-treatment, and 4 w, 8 w, 12 w, and 42 w indicate 4 weeks, 8 weeks, 12 weeks, and 42 weeks, respectively, after the treatment. Phase 1 denotes the first phase of clinical trials. PB(pre) indicates peripheral blood before treatment; and BM(pre) indicates bone marrow before treatment.

### BEST MODE FOR CARRYING OUT THE INVENTION

[0088] The present inventors stained the peripheral lymphocytes from cancer patients with WT1 tetramer that comprises WT1 peptide/HLA-A*2402 complexes, and separated WT1 tetramer-positive cells one by one using a FACS; cDNAs were generated from each separated cell, and the nucleotide sequences encoding CDR3 contained in the Vβ chain of T-cell receptors (hereinafter may be referred to as “TCR”) of WT1-specific cytotoxic T-cells (CTLs, hereinafter may be referred to as “WT1-specific CTL”) were determined by applying PCR method (FIGS. 1-1 to 1-36). From these results, the amino acid sequences of the CDR3 were also determined (FIGS. 1-1 to 1-36; SEQ ID Nos.: 1696-3389). These sequences have been determined for the first time in the present invention.

[0089] Thus, in a first aspect, the present invention provides a polynucleotide having the nucleotide sequence encoding CDR3 of the Vβ chain of T-cell receptors (TCRs) of WT1-specific cytotoxic T-cells (CTLs) obtained from healthy individuals and HLA-A*2402-positive patients, wherein the polynucleotide is DNA having any of the CDR3 nucleotide sequences shown in SEQ ID Nos.: 1-1695, RNA complementary to the DNA, or a polynucleotide having a complementary sequence thereof. As used herein, these DNA and RNA molecules and the complementary polynucleotides thereof are collectively referred to as “CDR3 polynucleotides.” For example, the CDR3 polynucleotides include, in addition to the DNAs comprising the nucleotide sequences shown in SEQ ID Nos.: 1-1695, DNAs comprising these sequences. Also, for example, the CDR3 polynucleotides include, in addition to the RNAs complementary to the DNAs comprising the nucleotide sequences shown in SEQ ID Nos.: 1-1695, RNAs comprising these sequences. Further, for example, the CDR3 polynucleotides include polynucleotides having the sequences of the DNAs or RNAs, and polynucleotides complementary to the RNAs. The “CDR polynucleotides” include those having degenerate sequences encoding “CDR3 peptides.”

[0090] In another aspect, the present invention provides peptides having the amino acid sequences of CDR3 of the Vβ chain of T-cell receptors (TCRs) of WT1-specific cytotoxic T-cells (CTLs), which CDR3 amino acid sequences being shown in any of SEQ ID Nos.: 1696-3389. As used herein, these peptides are collectively referred to as “CDR3 peptides.” For example, the CDR3 peptides include, in addition to a peptide comprising any of the CDR3 amino acid sequences shown in SEQ ID Nos.: 1696-3389, peptides comprising these CDR3 amino acid sequences (such as, for example, Vβ chain peptides or a portion thereof). In addition, a peptide consisting or comprising the amino acid sequence shown in SEQ ID Nos.: 1696-3389 in which one or a few, preferably one to three, one or two, or one amino acid is substituted, added, or deleted is included in the “CDR3 peptides.” However, these peptides are required to have equivalent functions to the original peptide. These CDR3 peptides are encoded by the above-mentioned CDR3 polynucleotides.

[0091] The CDR3 regions are the most diverse portions and are the most responsible parts for the specificity of antigen recognition. Thus, the sequences of the CDR3 polynucleotides and CDR3 peptides of the present invention are considered peculiar to WT1-specific CTL in HLA-A*2402-positive patients. Therefore, provided that the polynucleotide encoding the CDR3 region of the gene for the TCR Vβ chain of a certain T-cell or the peptide corresponding to the CDR3 region have the sequence of the polynucleotide or peptide of the present invention, the T-cell is considered as specific for WT1. Accordingly, the CDR3 polynucleotides and CDR3 peptides of the present invention may find use as markers for a wide variety of cancers, use in applications such as diagnosis of cancer, diagnosis of the susceptibility of patients to WT1 peptide immunotherapy, and tests for the responsiveness in the patients to WT1 peptide immunotherapy.

[0092] The CDR3 polynucleotides and CDR3 peptides of the present invention may be present in the lymphocytes of patients with any type of cancer as long as the cancer is generated from cells containing WT1. WT1 is known as a cancer antigen in a variety of cancers and hematological malignancies. Thus, the CDR3 polynucleotides and CDR3 peptides of the present invention, as well as the methods of the present invention described below, may be applied to almost all the types of cancers including, but not limited to, for example, hematologic malignancies, such as acute myelocytic leukemia, acute lymphocytic leukemia, malignant lymphoma, multiple myeloma, chronic myelocytic leukemia, myelodysplastic syndrome, and recurrence after the transplantation of hematopoietic stem cells of the same type; solid cancers, such as tongue cancer, gingival cancer, mouth floor cancer, pharyngeal cancer, larynx cancer, salivary gland cancer, and thyroid cancer; thoracic cancers, such as breast cancer, lung cancer, and thymic cancer; gastrointestinal cancers, such as colon cancer, small intestine cancer, gastric cancer, pancreatic cancer, liver cancer, bile duct cancer, gastrointestinal endocrine tumor, and gastrointestinal carcinoid; cancers of urinary and genital tract, such as renal cancer, urothelial cancer, germinoma, Wilms' tumor, prostate cancer, uterine body cancer, cervical cancer, uterine sarcoma, and ovarian malignancy; musculoskeletal malignancies, such as primary malignancy of bone (e.g., osteosarcoma and Ewing's sarcoma) and soft tissue sarcoma; and other cancers, such as skin cancer, neuroblastoma, malignant glioma (glioblastoma), primary malignant lymphoma of the central nervous system, medulloblastoma, and PNET.

[0093] When producing CDR3 polynucleotides or CDR3 peptides, conventional genetic engineering techniques and/or chemical synthetic procedures may be used. For example, CDR3 polynucleotides may be isolated from cells or chemically synthesized. CDR3 polynucleotides may also be amplified using a known method, such as PCR. Also, for example, a CDR3 polynucleotide (optionally amplified to an appropriate level using a known method) may be integrated into a suitable vector and introduced into suitable cells, or may be introduced into suitable cells by biolistic bombardment or electroporation. Then the cells into which the CDR3 polynucleotide is introduced are cultured for expression, thereby obtaining the CDR3 polynucleotide or peptide. Available vectors and cells, conditions for gene transfer, culture conditions, and methods for isolating genes and peptides are known to those skilled in the art and appropriately selected for use. Chemical synthesis may be used to produce CDR3 polynucleotides or CDR3 peptides. Methods for such chemical synthesis are known, and the methods for chemical synthesis of genes include solid-phase DNA synthesis using amidite, and the 1-4 phosphonate method; the methods for chemical synthesis of peptides include the Fmoc method.

[0094] Thus, in a further aspect, the present invention provides a method for diagnosing cancer in an HLA-A*2402-positive patient, the method including assessing the clonality of WT1-specific CTL having any of the CDR3 polynucleotides or CDR3 peptides in a sample obtained from the patient before therapy, wherein if a multiplicity of clonality are present, the patient is determined to have a possibility of cancer. As used herein, the term “clonality” refers to the frequency of detection of cells having an identical nucleotide or amino acid sequence. To examine clonality, it is general to use a cell sorter that allows identification of individual cells. The “patients” include both humans suspected to have cancer and those suffering from cancer.

[0095] The present inventors have found that it is possible to determine whether a patient develops cancer or not by examining the clonality of WT1-specific CTL having any of the CDR3 polynucleotides or CDR3 peptides in the patient. As can be seen from FIGS. 2-1 to 2-36, in the healthy individuals (HV1 to HV4), the clonality of WT1-specific CTL having any of the CDR3 polynucleotides or CDR3 peptides is 1 for almost all the clones, and 2 or 3 for rare clones; however, by contrast, all the cancer patients before therapy (AMLs (acute myelocytic leukemia) 1-4 and MDS (myelodysplastic syndrome) 1-5) have a multiplicity of clonality of the WT1-specific CTLs having any of the CDR3 polynucleotides or CDR3 peptides without exception. The number of the clonality is larger and the types of such cells are more abundant than those of the healthy individuals. The increases in clonality and in types of cells having a multiplicity of clonality in patients before therapy indicate a possibility that defense and attack against cancer cells has already been launched in the patients.

[0096] In view of these results, the possibility of cancer in a patient may be determined if a multiplicity of clonality is found in the WT1-specific CTL having any of the CDR3 polynucleotides or CDR3 peptides when examining a sample from a subject. Further, it is possible to determine that the larger the clonality of WT1-specific CTL having any of the CDR3 polynucleotides or CDR3 peptides, or the more abundant the types of WT1-specific CTLs having a multiplicity of clonality, the higher the possibility of developing cancer is in the subject before therapy. Also, in the determination method, it is possible to determine that the higher the possibility of developing cancer in the patient before therapy is when the clonality of WT1-specific CTL having any of the CDR3 polynucleotides or CDR3 peptides and having the clonality of 3 or more is larger, or the types of WT1-specific CTL having the clonality of 3 or more are more abundant.

[0097] In a further aspect, the present invention provides a method for testing for the sensitivity of an HLA-A*2402-positive patient to WT1 peptide immunotherapy, the method including assessing the clonality and the number of types of WT1-specific CTL clones having any of the polynucleotides of claim 1 or any of the peptides of claim in a sample obtained from the patient before therapy, wherein the patient is determined to have the sensitivity to WT1 peptide immunotherapy when the types of WT1-specific CTL clones with a multiplicity of clonality are more abundant in the patient than in non-responsive subjects.

[0098] WT1-specific CTLs having any of the CDR3 polynucleotides or CDR3 peptides act against cancer cells in the patients. In this process, the clones that already have a multiplicity of clonality before the therapy tend to further increase the clonality or maintain their clonality by WT1 peptide immunotherapy. It is also considered that WT1 immunotherapy is more likely to be successful when there are clones of as many types as possible, which gives increased number and types of effective WT1-specific CTL clones as a whole. More strictly speaking, the sensitivity of a patient to WT1 peptide immunotherapy may be determined as being high when the types of WT1-specific CTL clones with a multiplicity of clonality are more abundant in the patient than in non-responsive subjects.

[0099] As can be seen from FIGS. 2-1 to 2-36, the AML patients who responded to WT1 peptide immunotherapy had a larger number of the types of clones with a multiplicity of clonality than the healthy subjects and non-responsive patients before the therapy. AML1 (responder): 10 types (clonality of 58 in total); AML2 (responder): 12 types (clonality of 93 in total); AML3 (non-responder): 9 types (clonality of 27 in total); and AML4 (non-responder): 3 types (clonality of 10 in total). Healthy individuals HV1-5 had clones with a multiplicity of clonality in a range of 0 to 2 types.

[0100] In a further aspect, the present invention provides a method for monitoring WT1 peptide immunotherapy in an HLA-A*2402-positive patient, the method including assessing the clonality of WT1-specific CTL clones having any of the polynucleotides of claim 1 or any of the peptides of claim 2 in a sample obtained from the patient before and after the therapy, wherein the patient is determined to have responded to WT1 peptide immunotherapy when the clonality of any of the WT1-specific CTL clones increases after the therapy compared to before the therapy.

[0101] As can be seen from FIGS. 2-1 to 2-36, WT1-specific CTLs are observed in which the clonality increased (including the cases where the clonality increased from 0 to 1 or more) in the AML patients during the period of WT1 peptide immunotherapy. The exemplary clones exhibiting such behavior include Clones #02.28, #05.034, #05.135, #05.219, #09.65, #12.04, #13.13, #27.016, and #28.83 from AML (Pt1), and Clones #02.27, #05.035, #05.141, #05.219, #06.009, #12.04, #12.20, #15.44, #20.068, and #27.032 from AML (Pt2). The presence of clones that increases their clonality due to WT1 peptide immunotherapy indicates the responsiveness to the WT1 peptide immunotherapy. In other words, increases in the clonality suggests that the WT1 peptide immunotherapy showed its effect for a certain period of time. These increases in clonality may be transient or sustained. If the clonality of certain clones may increase only temporarily and then decrease, the clonality of other WT1-specific CTLs would increase to complement the effect. Considering the effect on cancer cells, a larger increase in the clonality is more desired. Therefore, the larger becomes the increase in the clonality or the more abundant become the types of clones with increased clonality after the WT1 peptide immunotherapy, the patient may be determined to have higher responsiveness to the WT1 peptide immunotherapy. The number and properties of cancer cells may be examined using an appropriate method depending on the type and site of the cancer.

[0102] In the method for monitoring therapy, although the clonality is compared before and after WT1 peptide immunotherapy, the time period between the before and after the therapy may be of any length. For example, it may be a few days, one week, two, three, or four weeks, or two or three months or more.

[0103] In the methods of the present invention described above, the means and methods for assessing clonality and determining the types of clones (i.e., determining the amino acid sequences of CDR3 peptides or the nucleotide sequences encoding the same) are known in the art, and those skilled in the art may conveniently carry out these operations. For example, as shown in Examples in the specification, a known sorting apparatus, such as the FACSAria system, and a method for gene amplification, such as PCR (using, for example, a primer set selected from the sequences listed in Table 1), may be used. In order to analyze the CDR3 polynucleotides or CDR peptides of the present invention in a stricter or more definite manner, one has only to confirm whether the nucleotide sequences of CDR3, IMGT, and the J and D regions in the Vβ chain gene are shown in FIGS. 1-1 to 1-36. Such confirmation is well within the ordinary skill of the art.

[0104] WT1 peptide immunotherapy is also known. For example, it may be performed on HLA-A*2402-positive patients by administering HLA-A*2402-restricted WT1 peptide in the native form (having the amino acid sequence: CMTWNQMNL) or in the modified form (having the amino acid sequence: CYTWNQMNL) via, for example, a transdermal route. In general, a single dose is in the order of μg/kg body weight to mg/kg body weight, and it may be administered at an interval of one week to a few weeks.

[0105] In a further aspect, the present invention provides a chip comprising the CDR3 polynucleotides or the polynucleotides complementary thereto; a chip comprising the CDR3 peptides; or a chip comprising antibodies against the CDR3 peptides. The chips may be in the form of microchips, microarrays, and the like. The production of the chips may be conducted according to conventional methods; for example, antibodies raised against the CDR3 polynucleotides or CDR3 peptides may be immobilized on a glass substrate. The species of the CDR3 polynucleotides or the polynucleotides complementary thereto, the CDR3 peptides, or the antibodies against the CDR3 peptides that is immobilized on the chip may be one to all; preferably, all the species are immobilized for exhaustive analysis. For example, all the polynucleotides comprising the nucleotide sequences complementary to the nucleotide sequences shown in SEQ ID Nos.: 1-1695 may be immobilized on the chip; alternatively, for example, antibodies that specifically recognize and bind to all the peptides comprising the amino acid sequences shown in SEQ ID Nos.: 1696-3389 may be immobilized on the chip. The CDR3 polynucleotides or the polynucleotides complementary thereto, the CDR3 peptides, or the antibodies against the CDR3 peptides may be placed at any position on the chip.

[0106] The chips may be used for, for example, diagnosis of cancer as described above. The samples may be affected tissues, body fluids such as blood and lymphatic fluid, or mucosal membranes. Preferably, the samples are peripheral blood. For example, when CDR3 polynucleotides are to be analyzed, the nucleic acids are extracted from the cells according to conventional methods, and a chip onto which all the species of polynucleotides comprising the nucleotide sequences complementary to the nucleotide sequences shown in SEQ ID Nos.: 1-1695 are immobilized may be used to examine the species and quantity of the hybridized DNA present in the sample. Also, for example, when CDR3 peptides are to be analyzed, a chip onto which antibodies that specifically recognize and bind to all the species of peptides comprising the amino acid sequences shown in SEQ ID Nos.: 1696-3389 are immobilized may be used to examine the species and quantity of the specifically bound peptides present in the sample.

[0107] In this regard, the present invention provides an antibody that specifically recognizes and binds to a CDR3 peptide. Preferably, such an antibody specifically recognizes and binds to any of the amino acid sequences shown in SEQ ID Nos.: 1696-3389. Methods for preparing such an antibody are known to those skilled in the art.

[0108] Typically, DNAs in the sample or DNA sequences placed on the chip are labeled so that the presence or absence, or the amount of hybridization is indicated. For example, the presence or absence, or the species of CDR3 peptides in a sample may be identified by arraying antibodies for each of the CDR3 peptides of SEQ ID Nos.: 1696-3389 on a chip and testing for their specific binding to the CDR3 peptides present in the sample. Typically, the peptides in the sample or the antibodies on the chip are labeled so that the presence or absence of the specific binding can be determined. Labels capable of indicating the presence or absence and the amount of hybridization or specific binding are known and include, for example, fluorescent labels, radioactive labels, enzyme labels, and chromophore labels. One skilled in the art may conveniently select suitable labels. The chips described above may be used to analyze a plurality of samples at the same time.

[0109] The CDR3 polynucleotides and CDR peptides of the present invention may be analyzed and identified using a known method, such as Southern blotting, Northern blotting, colony hybridization, and ELISA, as well as using the chips described above.

[0110] As described above, the CDR3 DNAs of the present invention have been identified using the primers shown in Examples, particularly, the primer sets shown in Table 1. Therefore, the present invention provides primers for amplifying CDR polynucleotides, which primers having the sequences selected from the sequences shown in SEQ ID Nos.: 3389-3416. For example, a primer set comprising the primers shown in SEQ ID Nos.: 3391-3415 may be used for amplification of a CDR3 polynucleotide.

[0111] The present invention also provides a kit for diagnosing cancer including means for detecting a WT1-specific CTL having a CDR3 polynucleotide or CDR3 peptide; a kit for testing for the sensitivity of a patient to WT1 peptide immunotherapy; or a kit for monitoring WT1 peptide immunotherapy. The present invention further provides a device for cancer diagnosis including means for detecting a WT1-specific CTL having a CDR3 polynucleotide or CDR3 peptide; a device for testing for the sensitivity of a cancer patient to WT1 peptide immunotherapy; or a device for monitoring WT1 peptide immunotherapy. A part for amplifying genes, such as a primer set, as described above, a chip as described above, or means for analyzing the information obtained from the chip may be used in the kit as a component or in the device.

[0112] In still another aspect, the present invention relates to a lymphocyte from an HLA-A*2402-positive cancer patient, which lymphocyte incorporating a T-cell receptor gene containing a sequence of a CDR3 polynucleotide. Preferably, such a lymphocyte is a peripheral blood lymphocyte into which the gene for the Vβ chain of TCR of WT1-specific CTLs comprising a CDR3 polynucleotide of the present invention, and a gene for the Vα chain of TCR of WT1-specific CTLs. In preparation of such a peripheral blood lymphocyte, a single species of the gene for the Vβ chain of TCR of WT1-specific CTLs may be used to obtain a plurality of types of peripheral blood lymphocytes, which are in turn introduced into patients. However, in view of improving the therapeutic effect, it is preferred to use a plurality of species of the gene for the Vβ chain of TCR of WT1-specific CTLs to obtain a plurality of types of peripheral blood lymphocytes, which are in turn introduced into patients. Alternatively, it is also preferred to select the nucleotide sequences of a suitable gene to be introduced depending on individual circumstances, because the therapeutically effective nucleotide sequences in the gene may differ depending on patients and cancer types.

[0113] Methods for preparing a gene to be introduced and for introducing the gene into peripheral blood lymphocytes are known in the art. For example, a gene to be introduced may be integrated into a suitable vector and then introduced into suitable cells, or may be introduced into suitable cells by biolistic bombardment or electroporation. Other conditions for gene transfer and for cell culture may be appropriately selected by those skilled in the art.

[0114] The lymphocytes into which a gene has been introduced as described above may be cultured ex vivo to obtain a large amount of WT1-specific CTLs. Then, the CTLs obtained may be introduced into a cancer patient to kill tumor cells expressing WT1, thereby performing cancer therapy. Patients preferred for introduction of the CTLs obtained are the patients from whom the peripheral blood lymphocytes were obtained.

[0115] The cancer therapy described above may be combined with other cancer therapies including anti-cancer agents and radiotherapy. The cancer therapy described above has a wide range of applications. They are exemplified above, but are not limited thereto.

[0116] In still another aspect, the present invention provides an antibody against a CDR3 peptide and a method of use thereof. Methods for preparing such an antibody are known in the art. Such an antibody may be used to detect or identify a lymphocyte having the amino acid sequence of the CDR3 peptide of the present invention or an amino acid sequence containing the above sequence in its Vβ chain in the subject sample. For example, antibodies against peptides comprising the amino acid sequences of any of SEQ ID Nos.: 1696-3389 may be used to detect or identify cancer-specific lymphocytes. These antibodies may also be used to carry out the methods of the present invention, for example, the method for diagnosing cancer.

[0117] Such an antibody may also be contacted with lymphocytes having the amino acid sequence of CDR3 of the present invention to activate them. The lymphocytes thus activated may be used to treat cancer. Preferably, lymphocytes obtained from a cancer patient are activated and, if necessary, proliferated, and the cancer therapy is conducted by returning the lymphocytes to the patient. Such an antibody may also be used to enrich the WT1-specific T-cells of interest. For example, such an antibody may be used to enrich the WT1-specific T-cells in a cancer patient, thereby assisting the cancer therapy.

[0118] In a further aspect, the present invention provides a method for identifying the position and size of a solid cancer, the method including: administering the peripheral blood lymphocytes of the present invention described above after being labeled with a detectable label, and then examining the location and quantity of the label. The label may be a known label, such as radioactive label, e.g. Tecnecium-99, and fluorescent label. Methods for labeling cells are also known. Detection of labels and quantification of signals are also known in the art; they can be performed using a radiation counter, by fluorescence assay, or by obtaining a tissue sample by biopsy.

[0119] The present invention is illustrated in greater detail below with reference to Examples, but it should be understood that the present invention is not construed as being limited thereto.

### Example 1

### A. Experimental Methods and Materials Used

[0120] (1) Cells

[0121] Peripheral blood samples were obtained from five healthy volunteers (HV1 to HV5) and four HLA-A*2402-positive AML patients (AML1 to AML4). Bone marrow samples and peripheral blood samples were obtained from five HLA-A*2402-positive MDS patients (MDS1 to MDS5). More specifically, peripheral blood was obtained before treatment and at weeks 4, 8, 12, and 42 of treatment from ALM1. Peripheral blood was obtained before treatment and at weeks 4, 8, 12, and 42 of treatment from ALM2. Peripheral blood was obtained before treatment and at weeks 4 and 8 of treatment from ALM3. Peripheral blood was obtained before treatment and at week 4 of treatment from ALM4. From MDS1, bone marrow and peripheral blood were obtained before treatment; and peripheral blood was obtained at weeks 4, 8, and 12 of treatment. Peripheral blood and bone marrow before treatment were collected from MDS1 to MDS5. The peripheral blood samples obtained were subjected to Ficoll-Hypaque (Pharmacia, Uppsala, Sweden) density gradient centrifugation and peripheral blood mononuclear cells (PBMCs) were separated and stored frozen at −170° C. until use. The treatment on the patients was conducted using WT1 peptide immunotherapy. The amino acid sequence of the WT1 peptide used in the treatment is Cys-Tyr-Thr-Trp-Asn-Gln-Met-Asn-Leu (SEQ ID No.: 3390). This peptide was administered by intradermal injection at an interval of two weeks.

[0122] (2) Flow Cytometric Analysis and Sorting

[0123] Initially, 2×10⁶ PBMCs per sample were stained with PE-conjugated HLA-A*2402-WT1 235-243 tetramers (MBL, Tokyo, Japan) in FACS buffer (PBS containing 2% fetal bovine serum) for 30 minutes at 37° C. Subsequently, they were stained with monoclonal antibodies labeled with five different fluorescent dyes as described below for 25 minutes on ice in dark: FITC-labeled anti-CD4, CD14, CD16, CD19, and CD56, anti-CD3-PerCP, anti-CD8-APC-Cy7 (BD Bioscience, San Jose, Calif.), anti-CD45RA-APC, and anti-CCR7-PE-Cy7 (BD Pharmingen, San Diego, Calif.). The stained cells were washed twice in FACS buffer. Sorting was performed using the FACSAria system (BD Biosciences) and data analysis was performed using the FACSDiva software (BD Biosciences). As a result, single HLA-A*2402-WT1 235-243 tetramer⁺CD3⁺CD8⁺ cells were obtained from the fraction of CD4⁻CD14⁻CD16⁻CD19⁻CD56⁻ cells and were defined as WT1-Tet⁺ cells.

[0124] (3) cDNA Synthesis of the TCR-β Chain from the Single Cells Sorted

[0125] To eliminate DNA contamination for RT-PCR of sufficient single cells, cDNA synthesis was carried out, and all the steps of PCR were performed in a different clean bench. Single WT1-Tet⁺ cells were sorted directly in a PCR tube containing 15 μl of a cDNA reaction mixture. The cDNA reaction mixture contained the following components in lysis buffer (1×cDNA buffer containing 0.5% Triton X-100): reverse transcriptase (SuperScript III, Invitrogen, Carlsbad, Calif.), 0.5 mM dNTPs (Invitrogen), 20 units (U) of Rnase inhibitor (Invitrogen), 100 μg/ml gelatin (Roche, Indianapolis, Ind.), 100 μg/ml tRNA (Roche), and a 200 nM primer (5′-CACCAGTGTGGCCTTTTG-3′ (SEQ ID No.: 3391)) specific for the TCR-β chain constant region. After the sorting, the samples were incubated for 90 minutes at 50° C. for cDNA synthesis, and then incubated for 5 minutes at 95° C. for terminating the reaction.

[0126] (4) Semi-Nested Multiplex-PCR

[0127] Ten μl of a synthesized cDNA product obtained by the above procedure was added to 40 μl of a reaction mixture. The reaction mixture contained 1×PCR buffer, 2 mM MgCl₂, 0.25 mM dNTPs, 1.25 U DNA polymerase (Platinum Tag DNA Polymerase, Invitrogen), a 5 nM mixture of 24 different Vβ-family-specific forward primers (shown in Table 1), and 5 nM 3′-Cβ reverse primer (5′-GCTTCTGATGGCTCAAACACAGC-3′ (SEQ ID No.: 3392)). The procedure of PCR was as follows: a pre-PCR heating step at 95° C. for 2 minutes, followed by 40 cycles of a denaturing step at 95° C. for 45 seconds, an annealing step at 57° C. for 45 seconds, and an extension step at 72° C. for 50 seconds.

TABLE 1

| | | | |
|---|---|---|---|
| S2 | TRBV2 | GGTCACACAGATGGGACAGGAAGT | (SEQ ID No. 3393) |
| S2 | TRBV3 | CCCAGACTCCAAAATACCTGGTCA | (SEQ ID No. 3394) |
| S5 | TRBV4 | TACGCAGACACCAA<GA>ACACCTGGTCA | (SEQ ID No. 3395) |
| S1 | TRBV5 | ACAGCAAGTGAC<TAG>CTGAGATGCTC | (SEQ ID No. 3396) |
| S7 | TRBV6 | GTGTCACTCAGACCCCAAAATTCC | (SEQ ID No. 3397) |
| S4 | TRBV7-1 | GTGTGATCCAATTTCAGGTCATAC | (SEQ ID No. 3398) |
| S3 | TRBV7-3 | ATGTAACT<CT>TCAGGTGTGATCCAA | (SEQ ID No. 3399) |
| S1 | TRBV9 | ACAGCAAGTGAC<TAG>CTGAGATGCTC | (SEQ ID No. 3400) |
| S1 | TRBV10 | CCAAGACACAAGGTCACAGAGACA | (SEQ ID No. 3401) |
| S4 | TRBV11 | CAGTCTCCCAGATATAAGATTATAGAG | (SEQ ID No. 3402) |
| S4 | TRBV12 | GGTGACAGAGATGGGACAAGAAGT | (SEQ ID No. 3403) |
| S8 | TRBV13 | CTGATCAAAGAAAAGAGGGAAACAGCC | (SEQ ID No. 3404) |
| S6 | TRBV14 | ATAGAAGCTGGAGTTACTCAGTTC | (SEQ ID No. 3405) |
| S8 | TRBV15 | CAAGATACCAGGTTACCCAGTTTG | (SEQ ID No. 3406) |
| S5 | TRBV18 | TGCAGAACCCAAGACACCTGGTCA | (SEQ ID No. 3407) |
| S5 | TRBV19 | CACTCAGTCCCCAAAGTACCTGTT | (SEQ ID No. 3408) |
| S2 | TRBV20 | GAGTGCCGTTCCCTGGACTTTCAG | (SEQ ID No. 3409) |
| S6 | TRBV21 | AAGGTCACCCAGAGACCTAGACTT | (SEQ ID No. 3410) |
| S6 | TRBV23 | ACAAAGATGGATTGTACCCCCGAA | (SEQ ID No. 3411) |
| S7 | TRBV24 | GTTACCCAGACCCCAAGGAATAGG | (SEQ ID No. 3412) |
| 51 | TRBV25 | GATCACTCTGGAATGTTCTCAAACC | (SEQ ID No. 3413) |
| S3 | TRBV27 | GTGACCCAGAACCCAAGATACCTC | (SEQ ID No. 3414) |
| S2 | TRBV28 | GTAACCCAGAGCTCGAGATATCTA | (SEQ ID No. 3415) |
| S3 | TRBV29 | TCCAGTGTCAAGTCCATAGCCAAGTC | (SEQ ID No. 3416) |
| S5 | TRBV30 | GTCAGATCTCAGACTATTCATCAATGG | (SEQ ID No. 3417) |

[0128] Next, the PCR products were subjected to screening PCR. One μl of each PCR product was placed in separate 8 tubes and 24 μl of a reaction mixture was added to each of the tubes. The reaction mixture contained 1×PCR buffer, 2 mM MgCl₂, 0.2 mM dNTPs, 1.0 U of Platinum Taq DNA polymerase, one set of forward primers selected from the 8 screening sets S1 to S8, shown in Table 1, and 5′-Cβ reverse primer (5′-GGAACACGTTTTTCAGGTCCT-3′ (SEQ ID No.: 3418)) (150 nM each). The procedure of PCR was as follows: a pre-PCR heating step at 95° C. for 2 minutes, followed by 35 cycles of a denaturing step at 94° C. for 45 seconds, an annealing step at 57° C. for 45 seconds, and an extension step at 72° C. for 40 seconds.

[0129] To verify positive reactions in the 8 screening PCRs, 5 μl of each screening PCR product was subjected to 2% agarose gel electrophoresis, followed by further PCR. This PCR was performed 35 cycles using 150 nM each of the Vβ-specific forward primers contained in the screening sets that were confirmed as positive. The positive reaction was verified by 2% agarose gel electrophoresis. A cell-free system was used as negative contrast, and three wells were prepared for the negative contrast in the same manner as above. The experiment was performed according to the same procedure.

### (5) Determination and Analysis of the Sequences of the Complementality-Determining Region 3 (CDR3) of TCR-β

[0130] Amplified fragments of the TCR-β gene were purified using the PCR Purification Kit (Qiagen, Valencia, Calif.). Corresponding TCR VP-specific forward primers were used for sequencing. The ABI PRIAM BigDye Terminator v 3.1 Cycle Sequencing kit (Applied Biosystems, Foster City, Calif., USA) was used for sequencing, and the ABI PRISM 3100 Genetic Analyzer (Applied Biosystems) was used for analysis. The sequence data on CDR3 were analyzed by comparing the sequences with those available from the website of the IMGT human TCR gene database (http://imgt.cines.fr).

### B. Results

[0131] The sequences of the gene for the Vβ chain, the J region sequences, D region sequences, N region sequences, CDR3 nucleotide sequences, and CDR3 amino acid sequences of WT1-specific CTLs derived from healthy individuals and cancer patients (AML1 to AML4 and MDS1 to MDS5) are shown in FIGS. 1-1 to 1-36. The clonality of each WT1-specific CTL is shown in FIGS. 2-1 to 2-36. The CDR3 nucleotide sequences are shown in SEQ ID Nos.: 1-1695 (since clones #24.29 and #28.92 have the identical CDR3 nucleotide sequence, only clone #24.29 is shown in the Sequence Listing), and the CDR3 amino acid sequences are shown in SEQ ID Nos.: 1696-3389 (since clones #2.53 and #28.58 have the identical CDR3 amino acid sequence, and so do clones #24.29 and #28.92, only clones #2.53 and #24.19 are shown in the Sequence Listing). Among the AML patients, AML1 and AML2 responded to the treatment, but AML3 and AML4 did not. The response of the MDS patients to the treatment has not been determined.

[0132] As can be seen from FIGS. 2-1 to 2-36, in the healthy individuals (HV1 to HV4), the clonality of WT1-specific CTL having any of the CDR3 polynucleotides or CDR3 peptides is 1 for almost all the clones, and 2 or 3 for rare clones; however, all the cancer patients before therapy (AMLs and MDSs) have a multiplicity of clonality of the WT1-specific CTLs having any of the CDR3 polynucleotides or CDR3 peptides without exception. The number of the clonality was larger and the types of such cells were more abundant in the cancer patients than in the healthy individuals.

[0133] The increases in clonality and in types of cells having a multiplicity of clonality in patients before therapy indicate a possibility that defense and attack against cancer cells has already been launched in the patients and suggest that cancer cell are already present in the patients.

[0134] Also, as can be seen from FIGS. 2-1 to 2-36, the AML patients who responded to WT1 peptide immunotherapy had a larger number of types of clones with a multiplicity of clonality than the healthy subjects and non-responsive patients before the therapy. AML1 (responder): 10 types (clonality of 58 in total); AML2 (responder): 12 types (clonality of 93 in total); AML3 (non-responder): 9 types (clonality of 27 in total); and AML4 (non-responder): 3 types (clonality of 10 in total). Healthy individuals HV1-5 had clones with a multiplicity of clonality in a range of 0 to 2 types.

[0135] The clones that already have a multiplicity of clonality before the therapy tend to further increase the clonality or maintain their clonality by WT1 peptide immunotherapy. It is also considered that WT1 peptide immunotherapy is more likely to be successful when there are clones of as many types as possible, which gives increased number and types of effective WT1-specific CTL clones as a whole.

[0136] As can be seen from FIGS. 2-1 to 2-36, WT1-specific CTLs were observed in which the clonality increased either temporarily or continuously (including the cases where the clonality increased from 0 to 1 or more) in the AML patients during the period of WT1 peptide immunotherapy. The exemplary clones exhibiting such behavior include clones #02.28, #05.034, #05.135, #05.219, #09.65, #12.04, #13.13, #27.016, and #28.83 from AML (patient 1—a responder), and clones #02.27, #05.035, #05.141, #05.219, #06.009, #12.04, #12.20, #15.44, #20.068, and #27.032 from AML (patient 1—a non-responder). For example, from the change in the clonality of clone #02.28 from AML patient 1, it is found that the therapeutic effect was high at the onset of the treatment and at week 4.

[0137] An increase in the clonality of a certain clone indicates that the WT1 peptide immunotherapy showed its effect for a certain period of time. Even if the clonality of certain clones may increase temporarily and then decrease, the clonality of other WT1-specific CTLs would increase to complement the effect. Considering the effect on cancer cells, a larger increase in the clonality is more desired. Therefore, the larger becomes the increase in the clonality or the more abundant become the types of clones with increased clonality after the WT1 peptide immunotherapy, the responsiveness to the WT1 peptide immunotherapy is considered to have been high.

### INDUSTRIAL APPLICABILITY

[0138] The present invention may provide pharmaceutical compositions useful for anti-cancer therapy, cancer test kits or reagents, reagents for cancer research, and the like. Therefore, the present invention may find use in the fields of pharmaceuticals for cancer therapy, of cancer test kits or reagents, and of cancer research.

The application's sequence listing, which the Patent Office published only in electronic form, follows.

SEQUENCE LISTING (3418 sequences)

SEQ ID NO: 1 - DNA, 42 bp, Human
tgtgccggggcaccccgaataaacaccggggagctgtttttt

SEQ ID NO: 2 - DNA, 36 bp, Human
tgtgccgggttcgcgcccaacgagccccagcatttt

SEQ ID NO: 3 - DNA, 33 bp, Human
tgtgccaaacagcggaacactgaagctttcttt

SEQ ID NO: 4 - DNA, 39 bp, Human
tgtgccctagaggaggggggctacaatgagcagttcttc

SEQ ID NO: 5 - DNA, 42 bp, Human
tgtgccaacagtgaagcgcctatcgactacgaccagtacttc

SEQ ID NO: 6 - DNA, 42 bp, Human
tgtgccaacagtgaagcgcctatcgactacgagcagtacttc

SEQ ID NO: 7 - DNA, 48 bp, Human
tgtgccaacagtatcgactggcggaagggaccagatacgcagtatttt

SEQ ID NO: 8 - DNA, 39 bp, Human
tgtgccaacgtgttccacgaggggcatggctacaccttc

SEQ ID NO: 9 - DNA, 33 bp, Human
tgtgccagggacattacagatacgcagtatttt

SEQ ID NO: 10 - DNA, 36 bp, Human
tgtgccagcgacccggggatctatggctacaccttc

SEQ ID NO: 11 - DNA, 42 bp, Human
tgtgccagcgatagcgggagaagcacagatacgcagtatttt

SEQ ID NO: 12 - DNA, 48 bp, Human
tgtgccagcggggggctgactagcgggagccgggatacgcagtatttt

SEQ ID NO: 13 - DNA, 39 bp, Human
tgtgccagcggcatacaggggcgcaatgagcagttcttc

SEQ ID NO: 14 - DNA, 51 bp, Human
tgtgccagcaaggtgacagaatgggtacaagccaaaaacattcagtacttc

SEQ ID NO: 15 - DNA, 39 bp, Human
tgtgccagcctggggagggggcggcagccccagcatttt

SEQ ID NO: 16 - DNA, 45 bp, Human
tgtgccagcaatgatgtggtttatagcaatcatccccttgatttt

SEQ ID NO: 17 - DNA, 42 bp, Human
tgtgccagcaatgaagcccctagcgactacgagcagtacttc

SEQ ID NO: 18 - DNA, 42 bp, Human
tgtgccagcaacgaatccactagcgactacgagcagtacttc

SEQ ID NO: 19 - DNA, 45 bp, Human
tgtgccagcaacaggccggacagcacgtactacgagcagtacttc

SEQ ID NO: 20 - DNA, 41 bp, Human
tgtgccagcagggacgggacttactacaccggggagctgtt

SEQ ID NO: 21 - DNA, 39 bp, Human
tgtgccagcagggacaggggtgccggggagctgtttttt

SEQ ID NO: 22 - DNA, 36 bp, Human
tgtgccagcaggggcggaccctacgagcagtacttc

SEQ ID NO: 23 - DNA, 51 bp, Human
tgtgccagcagggtgacagaatgggtactagccaaaaacattcagtacttc

SEQ ID NO: 24 - DNA, 48 bp, Human
tgtgccagcagtgcacggactaccggggatcaagaaacccagtacttc

SEQ ID NO: 25 - DNA, 51 bp, Human
tgtgccagcagtgatggaaaggatacgttcatgaacactgaagctttcttt

SEQ ID NO: 26 - DNA, 45 bp, Human
tgtgccagcagtgatccgcacagggacagcactgaagctttcttt

SEQ ID NO: 27 - DNA, 45 bp, Human
tgtgccagcagtgatgtgggttatagcaatcagccccagcatttt

SEQ ID NO: 28 - DNA, 42 bp, Human
tgtgccagcagtgaagcgcctagcgactacgagcagtacttc

SEQ ID NO: 29 - DNA, 42 bp, Human
tgtgccagcagtgaagcgcctagcaactacgagcagtacttc

SEQ ID NO: 30 - DNA, 45 bp, Human
tgtgccagcagtgaagcgcagcgggaaggagatacgcagtatttt

SEQ ID NO: 31 - DNA, 42 bp, Human
tgtgccagcagtgaagcgactagcgactacgagcagtacttc

SEQ ID NO: 32 - DNA, 42 bp, Human
tgtgccagcagtgaggacggcagctcagggccccagcatttt

SEQ ID NO: 33 - DNA, 45 bp, Human
tgtgccagcagtgaagggggcgggggcgcggagacccagtacttc

SEQ ID NO: 34 - DNA, 45 bp, Human
tgtgccagcagcgaaggtggagggggccaagagacccagtacttc

SEQ ID NO: 35 - DNA, 45 bp, Human
tgtgccagcagtgagggactagcgattacagatacgcagtatttt

SEQ ID NO: 36 - DNA, 48 bp, Human
tgtgccagcagtgaagggtctagcgggttttcctacgagcagtacttc

SEQ ID NO: 37 - DNA, 45 bp, Human
tgtgccagcagtgaaggaactagcggatcctacgagcagtacttc

SEQ ID NO: 38 - DNA, 48 bp, Human
  misc_feature (27)..(27): n is a, c, g, or t
tgtgccagcagtgaaaacggagcgggnacatccgatgagcagttcttc

SEQ ID NO: 39 - DNA, 45 bp, Human
tgtgccagcagtgaatcaggaacgataatggagacccagtacttc

SEQ ID NO: 40 - DNA, 45 bp, Human
tgtgccagcagtgaaacaggctctagcacagatacgcagtatttt

SEQ ID NO: 41 - DNA, 39 bp, Human
tgtgccagcagtgaaacgggaacctacgagcagtacttc

SEQ ID NO: 42 - DNA, 45 bp, Human
tgtgccagcagtggagaggcgggagggggggagacccagtacttc

SEQ ID NO: 43 - DNA, 45 bp, Human
tgtgccagcagtggaggggcgggagggggggaaacccagtacttc

SEQ ID NO: 44 - DNA, 36 bp, Human
tgtgccagcagcggggggaacgagccccatgatttt

SEQ ID NO: 45 - DNA, 36 bp, Human
tgtgccagcagtggggggaacgagccccagcatttt

SEQ ID NO: 46 - DNA, 36 bp, Human
tgtgccagcagtggggggaaccagccccatgatttt

SEQ ID NO: 47 - DNA, 36 bp, Human
tgtgccagcagtggggggaatcagtcccatgatttt

SEQ ID NO: 48 - DNA, 51 bp, Human
tgtgccagcagcgggaccttactagcgggagctagggatgagcagttcttc

SEQ ID NO: 49 - DNA, 51 bp, Human
tgtgccagcagcgggaccttactatcccaagctagggatgagcagttcttc

SEQ ID NO: 50 - DNA, 51 bp, Human
tgtgccagcagtgggactagcgggaggcccctatcctacgagcagtacttc

SEQ ID NO: 51 - DNA, 45 bp, Human
tgtgccagcagtttattctgggctccccccgacgagcagtacttc

SEQ ID NO: 52 - DNA, 33 bp, Human
tgtgccagcagcctcacagatacccactatttt

SEQ ID NO: 53 - DNA, 33 bp, Human
tgtgccagcagcctcacagatacgcagtatttt

SEQ ID NO: 54 - DNA, 45 bp, Human
tgtgccagcagtctggttaacgggagagctgacgagcagtacttc

SEQ ID NO: 55 - DNA, 39 bp, Human
tgtgccagcagtatgacaaggagcactgaagctttcttt

SEQ ID NO: 56 - DNA, 42 bp, Human
tgtgccagcagtaacgggggagggaacactgaagctttcttt

SEQ ID NO: 57 - DNA, 45 bp, Human
tgtgccagcagtccggaaagcctccgcacagatacgcagtatttt

SEQ ID NO: 58 - DNA, 42 bp, Human
tgtgccagcagtcagggactggaagcggacgagcagtacttc

SEQ ID NO: 59 - DNA, 45 bp, Human
tgtgccagcagttccgggactagcccctacaatgagcagttcttc

SEQ ID NO: 60 - DNA, 39 bp, Human
tgtgccagcagttccccagggtcctacgagcagtacttc

SEQ ID NO: 61 - DNA, 39 bp, Human
tgtgccagcagttcaagtggagcagatacgcagtatttt

SEQ ID NO: 62 - DNA, 45 bp, Human
tgtgccagcagcactctagcgggtagcacagatacgcagtatttt

SEQ ID NO: 63 - DNA, 36 bp, Human
tgtgccagcagtgtacagggccttgaagctttcttt

SEQ ID NO: 64 - DNA, 42 bp, Human
tgtgccagcactgaagcgcctaacgactacgagcagtacttc

SEQ ID NO: 65 - DNA, 42 bp, Human
tgtgccagcacgttcgagggagatacagatacgcagtatttt

SEQ ID NO: 66 - DNA, 42 bp, Human
tgtgccagcgggcacctccgttcctacaatgagcagttcttc

SEQ ID NO: 67 - DNA, 48 bp, Human
tgtgccagccattatagagctagcgtgaacaccggggagctgtttttt

SEQ ID NO: 68 - DNA, 36 bp, Human
tgtgccagcagcgagggtctctatggctacaccttc

SEQ ID NO: 69 - DNA, 48 bp, Human
tgtgccagcagccacctagcggcgagctcctacaatgagcagttcttc

SEQ ID NO: 70 - DNA, 51 bp, Human
tgtgccagcagccatagtatggggggagggggctacaatgagcagttcttc

SEQ ID NO: 71 - DNA, 48 bp, Human
tgtgccagcagccacactagcgggagggccggtaatgagcagttcttc

SEQ ID NO: 72 - DNA, 48 bp, Human
tgtgccagcagccttcgatcgggtggaggtggggatacgcagtatttt

SEQ ID NO: 73 - DNA, 48 bp, Human
tgtgccagcagcctctcagggaaccggtctattcagaccccttctttt

SEQ ID NO: 74 - DNA, 45 bp, Human
tgtgccagcagcctatctagcgggaggacttacgagcagtacttc

SEQ ID NO: 75 - DNA, 39 bp, Human
tgtgccagcagccccgccgggactagggagcagttcttc

SEQ ID NO: 76 - DNA, 45 bp, Human
tgtgccagcagcccattagcgggattcacagatacgcagtatttt

SEQ ID NO: 77 - DNA, 48 bp, Human
tgtgccagcagccccccgacgggggatttttattcacccctccacttt

SEQ ID NO: 78 - DNA, 45 bp, Human
tgtgccagcagcccacgggcgggagctggtggtgagcagttcttc

SEQ ID NO: 79 - DNA, 42 bp, Human
tgtgccagcagcccacgccccggaggggaaaaactgtttttt

SEQ ID NO: 80 - DNA, 45 bp, Human
tgtgccagcagccccagcgggaccttagaggctacgcagtatttt

SEQ ID NO: 81 - DNA, 45 bp, Human
tgtgccagcagccccagcaggggggcctacaatgagcagttcttc

SEQ ID NO: 82 - DNA, 45 bp, Human
tgtgccagcagcccttggacaggttcgtcctacgagcagtacttc

SEQ ID NO: 83 - DNA, 48 bp, Human
tgtgccagcagccaggcacagggctcactctcctacgagcagtacttc

SEQ ID NO: 84 - DNA, 42 bp, Human
tgtgccagcagccaagacgcgacagggaatggctacaccttc

SEQ ID NO: 85 - DNA, 51 bp, Human
tgtgccagcagccaagaccggacaggggttgggaatcagccccagcatttt

SEQ ID NO: 86 - DNA, 42 bp, Human
tgtgccagcagccaagatagcgggccctacgagcagtacttc

SEQ ID NO: 87 - DNA, 42 bp, Human
tgtgccagcagccaagattcaccatcttatggctacaccttc

SEQ ID NO: 88 - DNA, 51 bp, Human
tgtgccagcagccaagaaggtccttacagctcctacaatgagcagttcttc

SEQ ID NO: 89 - DNA, 36 bp, Human
tgtgccagcagccaggggatggatggctacgccttc

SEQ ID NO: 90 - DNA, 45 bp, Human
tgtgccagcagccaaccgggacagcgaaggggtggctacaccttc

SEQ ID NO: 91 - DNA, 48 bp, Human
tgtgccagcagccaaccgactagcgggagtatttatgagcagttcttc

SEQ ID NO: 92 - DNA, 45 bp, Human
tgtgccagcagccaacaattgcgggagggcgacgagcagtacttc

SEQ ID NO: 93 - DNA, 48 bp, Human
tgtgccagcagccaaagagtaggactagcaaccaatgagcagttcttc

SEQ ID NO: 94 - DNA, 45 bp, Human
tgtgccagcagccagtcgggcgggaaaacctacgagcagtacttc

SEQ ID NO: 95 - DNA, 54 bp, Human
tgtgccagcagccaagtcattggggatctctctggggccaacgtcctgactttc

SEQ ID NO: 96 - DNA, 57 bp, Human
tgtgccagcagccggggattgactagggaaggcctctcctacaatgagcagttcttc

SEQ ID NO: 97 - DNA, 51 bp, Human
tgtgccagcagccgacctgcgggtgcccttggggccaacgtcctgactttc

SEQ ID NO: 98 - DNA, 42 bp, Human
tgtgccagcagccgaagacagcagaatgaaaaactgtttttt

SEQ ID NO: 99 - DNA, 54 bp, Human
tgtgccagcagctcccaatggaccgaggaaccgaagggctatggctacaccttc

SEQ ID NO: 100 - DNA, 42 bp, Human
tgtgccagcaccccctcgacggagaacactgaagctttcttt

SEQ ID NO: 101 - DNA, 45 bp, Human
tgtgccggcagccaaggattgggccgtggaaacaccatatatttt

SEQ ID NO: 102 - DNA, 36 bp, Human
tgcgccagcagacagggccccaatgagcagttcttc

SEQ ID NO: 103 - DNA, 45 bp, Human
tgcgccagcagaacgggacaggggtccaccggggagctgtttttt

SEQ ID NO: 104 - DNA, 30 bp, Human
tgcgccagcagcgatgggtcgcagtatttt

SEQ ID NO: 105 - DNA, 39 bp, Human
tgtgccagcagccatccccaggccggggagctgtttttt

SEQ ID NO: 106 - DNA, 51 bp, Human
tgcgccagcagccacccgaggttagcgggagacgacaatgagcagttcttc

SEQ ID NO: 107 - DNA, 48 bp, Human
tgcgccagcagccatccgaggacagaccaccaagagacccagtacttc

SEQ ID NO: 108 - DNA, 48 bp, Human
tgcgccagcagccatccatcagcggggtcggccggcgagcagtacttc

SEQ ID NO: 109 - DNA, 45 bp, Human
tgcgccagcagccataggagacaagttaattcacccctccacttt

SEQ ID NO: 110 - DNA, 51 bp, Human
tgcgccagcagcaaaggggagggacggatttctggaaacaccatatatttt

SEQ ID NO: 111 - DNA, 45 bp, Human
tgcgccagcagcctggacagaacgaacaccggggagctgtttttt

SEQ ID NO: 112 - DNA, 36 bp, Human
tgtgccagcagcctcggcgacgaggagcagttcttc

SEQ ID NO: 113 - DNA, 42 bp, Human
tgcgccagcagcctaggattgacgaacaatgagcagttcttc

SEQ ID NO: 114 - DNA, 48 bp, Human
tgcgccagcagcctcagactagcgggagatgcggagacccagtacttc

SEQ ID NO: 115 - DNA, 48 bp, Human
tgcgccagcagcttgactgttgcgggagggatgaacgagcagtacttc

SEQ ID NO: 116 - DNA, 45 bp, Human
tgtgccagcagcctagtggcgaaatcctacaatgagcagttcttc

SEQ ID NO: 117 - DNA, 48 bp, Human
tgtgccagcagccttgtccaatacagtccgaacactgaagctttcttt

SEQ ID NO: 118 - DNA, 48 bp, Human
tgcgccagcagcaacggacagggacggaataattcacccctccacttt

SEQ ID NO: 119 - DNA, 48 bp, Human
tgcgccagcagcccagctgggaccctgaacaccggggagctgtttttt

SEQ ID NO: 120 - DNA, 42 bp, Human
tgcgccagcagcccagggggcagcaactatggctacaccttc

SEQ ID NO: 121 - DNA, 45 bp, Human
tgcgccagcagcccgggacagcatagcaatcagccccagcatttt

SEQ ID NO: 122 - DNA, 48 bp, Human
tgtgccagcagccccttggatagcggagccgggacggatcaatacttc

SEQ ID NO: 123 - DNA, 48 bp, Human
tgtgccagcagccccttggatagcggagccgggacggagcagtacttc

SEQ ID NO: 124 - DNA, 45 bp, Human
tgcgccagcagcccacttagggtagggccctacgagcagtacttc

SEQ ID NO: 125 - DNA, 36 bp, Human
tgcgccagcagccccccggagggtacgcagtatttt

SEQ ID NO: 126 - DNA, 45 bp, Human
tgcgccagcagcccgaggagttcgaacaccggggagctgtttttt

SEQ ID NO: 127 - DNA, 45 bp, Human
tgcgccagcagcccacgtacggagactaactatggctacaccttc

SEQ ID NO: 128 - DNA, 45 bp, Human
tgtgccagcagccccaggactagcggagaagagacccagtacttc

SEQ ID NO: 129 - DNA, 45 bp, Human
tgcgccagcagccctagcgggggggccctagagacccagtacttc

SEQ ID NO: 130 - DNA, 42 bp, Human
tgcgccagcagcccctcgggacaggggagatcggcgttcttc

SEQ ID NO: 131 - DNA, 51 bp, Human
tgcgccagcagcccgagccatacagggaacactggaaacaccatatatttt

SEQ ID NO: 132 - DNA, 39 bp, Human
tgcgccagcagcccttccctctacaatgagcagttcttc

SEQ ID NO: 133 - DNA, 45 bp, Human
tgcgccagcagcccctcccggggtccatcctacgagcagtacttc

SEQ ID NO: 134 - DNA, 39 bp, Human
tgcgccagcagcccgtatacgggaaacaccatatatttt

SEQ ID NO: 135 - DNA, 48 bp, Human
tgcgccagcagccaagcattccagggatcgaacactgaagctttcttt

SEQ ID NO: 136 - DNA, 42 bp, Human
tgcgccagcagccaagccggggccgcctacgagcagtacttc

SEQ ID NO: 137 - DNA, 51 bp, Human
tgcgccagcagccaagccagcggactagcgggaggatacgagcagtacttc

SEQ ID NO: 138 - DNA, 45 bp, Human
tgcgccagcagccaagatgagagggtaacagagacccagtacttc

SEQ ID NO: 139 - DNA, 42 bp, Human
tgcgccagcagccaagatttcgggagaaccgagcagtacttc

SEQ ID NO: 140 - DNA, 51 bp, Human
tgtgccagcagccaagatggggaagggggcgctgactatggctacaccttc

SEQ ID NO: 141 - DNA, 48 bp, Human
tgtgccagcagccaagatatcgggacagggccgactgaagctttcttt

SEQ ID NO: 142 - DNA, 48 bp, Human
tgcgccagcagccaagatctggggggcagtggaaacaccatatatttt

SEQ ID NO: 143 - DNA, 45 bp, Human
tgcgccagcagccaagatctagggccaagcactgaagctttcttt

SEQ ID NO: 144 - DNA, 48 bp, Human
tgcgccagcagccaagatcccgggatggagaccggggagctgtttttt

SEQ ID NO: 145 - DNA, 39 bp, Human
tgcgccagcagccaagatccgggctacgagcagtacttc

SEQ ID NO: 146 - DNA, 39 bp, Human
tgcgccagcagccaagattcagatcagacccaccatttt

SEQ ID NO: 147 - DNA, 48 bp, Human
tgtgccagcagccaagatagcgggagctcctacaatgagcagttcttc

SEQ ID NO: 148 - DNA, 45 bp, Human
tgcgccagcagccaagatagcggtattggtcagccccagcatttt

SEQ ID NO: 149 - DNA, 45 bp, Human
tgcgccagcagccaagattcgggaccctcctacgagcagtacttc

SEQ ID NO: 150 - DNA, 42 bp, Human
tgcgccagcagccaggattcgcacaccggggagctgtttttt

SEQ ID NO: 151 - DNA, 39 bp, Human
tgcgccagcagccaagattcaaatcagccccagcatttt

SEQ ID NO: 152 - DNA, 54 bp, Human
tgcgccagcagccaagattccccactagcgtccagctcctacgagcagtacttc

SEQ ID NO: 153 - DNA, 42 bp, Human
tgcgccagcagccaagacacgtaccaagagacccagtacttc

SEQ ID NO: 154 - DNA, 45 bp, Human
tgcgccagcagccaagaagacagggtatccgagacccagtacttc

SEQ ID NO: 155 - DNA, 51 bp, Human
tgcgccagcagccaagaagagggaggtatgatcaatcagccccagcatttt

SEQ ID NO: 156 - DNA, 42 bp, Human
tgcgccagcagccaagaatttgggggtgatgagcagttcttc

SEQ ID NO: 157 - DNA, 51 bp, Human
tgcgccagcagccaagaaggagcggggcttagcacagatacgcagtatttt

SEQ ID NO: 158 - DNA, 42 bp, Human
tgcgccagcagccaagagggggcctctcatggctacaccttc

SEQ ID NO: 159 - DNA, 54 bp, Human
tgtgccagcagccaagaagggcagctagcggaggggggcggggagctgtttttt

SEQ ID NO: 160 - DNA, 42 bp, Human
tgcgccagcagccaagaggggaggggcaatgagcagttcttc

SEQ ID NO: 161 - DNA, 45 bp, Human
tgcgccagcagccaagaacacaggggattatacgagcagtacttc

SEQ ID NO: 162 - DNA, 51 bp, Human
tgcgccagcagccaagaattggggggagggactaagtacgagcagtacttc

SEQ ID NO: 163 - DNA, 45 bp, Human
tgcgccagcagccaagagcccgggggggtcgaaaagctgtttttt

SEQ ID NO: 164 - DNA, 48 bp, Human
tgtgccagcagccaagagcaagcgggaggggtggttacgcagtatttt

SEQ ID NO: 165 - DNA, 48 bp, Human
tgtgccagcagccaagaaaggggggagggccgtgatacgcagtatttt

SEQ ID NO: 166 - DNA, 51 bp, Human
tgtgccagcagccaagaaaggggacgaatctctggaaacaccatatatttt

SEQ ID NO: 167 - DNA, 45 bp, Human
tgtgccagcagccaagaggtggcgggggtgagggagcagtacttc

SEQ ID NO: 168 - DNA, 48 bp, Human
tgcgccagcagccaagaatggcccgaaagcggtcacaccatatatttt

SEQ ID NO: 169 - DNA, 42 bp, Human
tgcgccagcagccaaggagccgggggctacgagcagtacttc

SEQ ID NO: 170 - DNA, 45 bp, Human
tgcgccagcagccaaggggaccgaaactattcacccctccacttt

SEQ ID NO: 171 - DNA, 45 bp, Human
tgcgccagcagccaaggggaccgctatgtcactgaagctttcttt

SEQ ID NO: 172 - DNA, 42 bp, Human
tgcgccagcagccaaggggacagctcctacgagcagtacttc

SEQ ID NO: 173 - DNA, 42 bp, Human
tgtgccagcagccaagggggggaggggtacgagcagtacttc

SEQ ID NO: 174 - DNA, 45 bp, Human
tgcgccagcagccaaggcgggggggaaacctacgagcagtacttc

SEQ ID NO: 175 - DNA, 51 bp, Human
tgtgccagcagccaaggcgggggacagggttttatcactgaagctttcttt

SEQ ID NO: 176 - DNA, 39 bp, Human
tgtgccagcagccaagggggtcccggggagctgtttttt

SEQ ID NO: 177 - DNA, 42 bp, Human
tgcgccagcagccaaggggggacccaagagacccagtacttc

SEQ ID NO: 178 - DNA, 48 bp, Human
tgtgccagcagccaaggactagcgggagggccaggtacgcagtatttt

SEQ ID NO: 179 - DNA, 57 bp, Human
tgtgccagcagccaagggatgagggctagttggggttttgacaatgagcagttcttc

SEQ ID NO: 180 - DNA, 45 bp, Human
tgcgccagcagccaaggacggtatagcaatcagccccagcatttt

SEQ ID NO: 181 - DNA, 48 bp, Human
tgcgccagcagccaaggggtcgggcgggctaactatggctacaccttc

SEQ ID NO: 182 - DNA, 48 bp, Human
tgtgccagcagccaaaaactagcgggagatacagatacgcagtatttt

SEQ ID NO: 183 - DNA, 51 bp, Human
tgtgccagcagccaaaaaccgggactagcgggattcaacgagcagtacttc

SEQ ID NO: 184 - DNA, 42 bp, Human
tgcgccagcagccaaaaatggggtaatcacccccagcatttt

SEQ ID NO: 185 - DNA, 57 bp, Human
tgcgccagcagccaaaagtacagggttctggaactcggcacagatacgcagtatttt

SEQ ID NO: 186 - DNA, 48 bp, Human
tgcgccagcagccaactcgcgggaggggtagcagatacgcagtatttt

SEQ ID NO: 187 - DNA, 51 bp, Human
tgcgccagcagccaactcgggacagggggcgcgggggagacccagtacttc

SEQ ID NO: 188 - DNA, 48 bp, Human
tgcgccagcagccagccgggactagcgggatatgatgagcagttcttc

SEQ ID NO: 189 - DNA, 45 bp, Human
tgcgccagcagccagcctctgggacagaaagagacccagtacttc

SEQ ID NO: 190 - DNA, 45 bp, Human
tgcgccagcagccaaagggcggttggggactatggctacaccttc

SEQ ID NO: 191 - DNA, 48 bp, Human
tgcgccagcagccaacgcgggactagcgggaagaatgagcagttcttc

SEQ ID NO: 192 - DNA, 42 bp, Human
tgcgccagcagccaacgacaaactggctacgagcagtacttc

SEQ ID NO: 193 - DNA, 54 bp, Human
tgcgccagcagccaatcgttagctgtagctacctcctacaatgagcagttcttc

SEQ ID NO: 194 - DNA, 48 bp, Human
tgcgccagcagccagaccgggagggggccctcctacgagcagtacttc

SEQ ID NO: 195 - DNA, 42 bp, Human
tgcgccagcagccaaaccgggacttcctacgagcagtacttc

SEQ ID NO: 196 - DNA, 48 bp, Human
tgcgccagcagccaagtgcgaagcgggggagcctacgagcagtacttc

SEQ ID NO: 197 - DNA, 45 bp, Human
tgcgccagcagccaagtatcagaagctaactatggctacaccttc

SEQ ID NO: 198 - DNA, 45 bp, Human
tgcgccagcagccaagtgacagggggctcctatggctacaccttc

SEQ ID NO: 199 - DNA, 48 bp, Human
tgcgccagcagccaggtaacggggacagggcgatacgagcagtacttc

SEQ ID NO: 200 - DNA, 39 bp, Human
tgcgccagcagccaagttacatcctacgagcagtacttc

SEQ ID NO: 201 - DNA, 48 bp, Human
tgcgccagcagccggggactagcgggaggacacaatgagcagttcttc

SEQ ID NO: 202 - DNA, 54 bp, Human
tgcgccagcagctcagacactagcgggagcaccaggggcaatgagcagttcttc

SEQ ID NO: 203 - DNA, 39 bp, Human
tgcgccagcagttccagggggtggaagacccagtacttc

SEQ ID NO: 204 - DNA, 42 bp, Human
tgtgccagcagcacatcgtctcgcgacaatgagcagttcttc

SEQ ID NO: 205 - DNA, 45 bp, Human
tgtgccagcagctacgacagggagactaatgaaaaactgtttttt

SEQ ID NO: 206 - DNA, 42 bp, Human
tgcgccagcagctactaccaggggggcggcgagcagtacttc

SEQ ID NO: 207 - DNA, 45 bp, Human
tgtgcctgcagctttggggaacggggctacaatgggcagttcttc

SEQ ID NO: 208 - DNA, 57 bp, Human
tgtgccaacccgccgatcgtgggagcggttgtgtctggggccaacgtcctgactttc

SEQ ID NO: 209 - DNA, 45 bp, Human
tgtgccaacagctttggggaccgggccaacaatgaacagttcttc

SEQ ID NO: 210 - DNA, 45 bp, Human
tgtgcccccagctttggggacagggcctacagtgacaagttcttc

SEQ ID NO: 211 - DNA, 42 bp, Human
tgtgccagagaagggcaggggccctacaatgagcagttcttc

SEQ ID NO: 212 - DNA, 39 bp, Human
tgtgcccgcagctttgcctccggctatgaacaattcttc

SEQ ID NO: 213 - DNA, 36 bp, Human
tgtgccagtgaaggagggcccgatgagcagttcttc

SEQ ID NO: 214 - DNA, 45 bp, Human
tgtgccagcgggacactagcgaccagcacagatacgcagtatttt

SEQ ID NO: 215 - DNA, 42 bp, Human
tgcgccagccaccaagcggggggctacactgaagctttcttt

SEQ ID NO: 216 - DNA, 45 bp, Human
tgcgccagcaaactagcggggggaacccaagagacccagtacttc

SEQ ID NO: 217 - DNA, 36 bp, Human
tgcgccagcatggtgggagacactgaagctttcttt

SEQ ID NO: 218 - DNA, 45 bp, Human
tgtgccagcaaccttggcctcaacccctacaatgagcagttcttc

SEQ ID NO: 219 - DNA, 45 bp, Human
tgtgccagcccttttggggacaggccctaccatgagcagttcttc

SEQ ID NO: 220 - DNA, 42 bp, Human
tgtgccagcagggatgaggggttgtggaatgagcagttcttc

SEQ ID NO: 221 - DNA, 39 bp, Human
tgcgccagcaggggggaatcctacaatgagcagttcttc

SEQ ID NO: 222 - DNA, 36 bp, Human
tgtgccagcaggatccagggctacgagcagtacttc

SEQ ID NO: 223 - DNA, 45 bp, Human
tgcgccagcagattgggtgagagctcctacaatgagcagttcttc

SEQ ID NO: 224 - DNA, 45 bp, Human
tgtgccagcaggctacgggactttacctacaatgagcagttcttc

SEQ ID NO: 225 - DNA, 45 bp, Human
tgtgccagcagacccctagcagagatctacaatgagcagttcttc

SEQ ID NO: 226 - DNA, 42 bp, Human
tgtgccagcaggccccctcgacagacagatacgcagtatttt

SEQ ID NO: 227 - DNA, 39 bp, Human
tgcgccagcagacaagggactactaatgagcagttcttc

SEQ ID NO: 228 - DNA, 42 bp, Human
tgcgccagcagacggcgggacgacacagatacgcagtatttt

SEQ ID NO: 229 - DNA, 51 bp, Human
tgtgccagcagcgccggggggtttagcgggagagggctcgagcagtacttc

SEQ ID NO: 230 - DNA, 48 bp, Human
tgcgccagcagcgcctcagcgggagttgaagcagatacgcagtatttt

SEQ ID NO: 231 - DNA, 40 bp, Human
tgcgccagcagcgcgtcagggggctacaatgagcagttct

SEQ ID NO: 232 - DNA, 54 bp, Human
tgtgccagcagcgaaaattcccctctagcgggaggtagaaatgagcagttcttc

SEQ ID NO: 233 - DNA, 45 bp, Human
tgtgccagcagcttcgcgggctccagctcctacgagcagtacttc

SEQ ID NO: 234 - DNA, 42 bp, Human
tgtgccagcagctttgacaaaaactcctacgagcagtacttc

SEQ ID NO: 235 - DNA, 48 bp, Human
tgtgccagcagctttgaagcgggaggctcctacaatgagcagttcttc

SEQ ID NO: 236 - DNA, 33 bp, Human
tgcgccagcagctttttcaatgagcagttcttc

SEQ ID NO: 237 - DNA, 45 bp, Human
tgtgccagcagctttggggctagcgggggctacgagcagtacttc

SEQ ID NO: 238 - DNA, 45 bp, Human
tgtgccagcagcttcggggacatcggctcctacgagcagtacttc

SEQ ID NO: 239 - DNA, 45 bp, Human
tgtgccagcagctttggggacagggccaacaatgagcagttcttc

SEQ ID NO: 240 - DNA, 45 bp, Human
tgtgccagcagctttggggacagggcctacaatgagcagttcttc

SEQ ID NO: 241 - DNA, 45 bp, Human
tgtgccagcagctttggggacagggcctactatgagcagttcttc

SEQ ID NO: 242 - DNA, 45 bp, Human
tgtgccagcagctttggggacagggactacaatgagcagttcttc

SEQ ID NO: 243 - DNA, 45 bp, Human
tgtgccagcagctttgggggcagggcctacaatgagcagtccttc

SEQ ID NO: 244 - DNA, 48 bp, Human
tgcgccagcagcttcgggacagcgaccgaaggctatggctacaccttc

SEQ ID NO: 245 - DNA, 36 bp, Human
tgtgccagcagctttgggacggaaaaagctttcttt

SEQ ID NO: 246 - DNA, 45 bp, Human
tgtgccagcagcttcgggacaggggcccttggggagcagtacttc

SEQ ID NO: 247 - DNA, 45 bp, Human
tgcgccagcagcttcctagcgggtttatacaatgagcagttcttc

SEQ ID NO: 248 - DNA, 45 bp, Human
tgtgccagcagctttctgggactaagatacaatgagcagttcttc

SEQ ID NO: 249 - DNA, 42 bp, Human
tgtgccagcagctttttgggcagcggggagacccagtacttc

SEQ ID NO: 250 - DNA, 39 bp, Human
tgcgccagcagctttaactctggaaacaccatatatttt

SEQ ID NO: 251 - DNA, 39 bp, Human
tgtgccagcagcttcccaggacttaacgagcagtacttc

SEQ ID NO: 252 - DNA, 45 bp, Human
tgtgccagcagcttccccgggacagggggccacgagcagtacttc

SEQ ID NO: 253 - DNA, 48 bp, Human
tgtgccagcagctttccgaaccacctgagctcctacgagcagtacttc

SEQ ID NO: 254 - DNA, 45 bp, Human
tgcgccagcagctttcccacagggggcagggatgagcagttcttc

SEQ ID NO: 255 - DNA, 45 bp, Human
tgtgccagcagcttccgggacggaacccaagagacccagtacttc

SEQ ID NO: 256 - DNA, 45 bp, Human
tgtgccagcagcttccgggacagaccgaaagagacccagtacttc

SEQ ID NO: 257 - DNA, 45 bp, Human
tgcgccagcagcttccgggacagaagctcctacgagcagtacttc

SEQ ID NO: 258 - DNA, 42 bp, Human
tgcgccagcagcttccgggacacctacaatgagcagttcttc

SEQ ID NO: 259 - DNA, 45 bp, Human
tgtgccagcagcttcagggggtcgggcaatcagccccagcatttt

SEQ ID NO: 260 - DNA, 42 bp, Human
tgtgccagcagcttccgactatcctacaatgagcagttcttc

SEQ ID NO: 261 - DNA, 42 bp, Human
tgcgccagcagctttagcggggcctacaatgagcagttcttc

SEQ ID NO: 262 - DNA, 42 bp, Human
tgcgccagcagctttagcggggcctacaatgagcggttcttc

SEQ ID NO: 263 - DNA, 51 bp, Human
tgcgccagcagcttctcagggacgtccgatttttacaatgagcagttcttc

SEQ ID NO: 264 - DNA, 36 bp, Human
tgtgccagcagctttagtaacactgaagctttcttt

SEQ ID NO: 265 - DNA, 60 bp, Human
tgtgccagcagcttttcgcctgggggacagcctctctctggggccaacgtcctgactttc

SEQ ID NO: 266 - DNA, 45 bp, Human
tgcgccagcagcttcacagggggcgatgcggaaaaactgtttttt

SEQ ID NO: 267 - DNA, 45 bp, Human
tgcgccagcagctttgtggggaagccctacaatgagcagttcttc

SEQ ID NO: 268 - DNA, 45 bp, Human
tgtgccagcagcgggggacaggggaccgtctacgagcagtacttc

SEQ ID NO: 269 - DNA, 36 bp, Human
tgtgccagcagcgggggccgcactgaatctttcttt

SEQ ID NO: 270 - DNA, 36 bp, Human
tgcgccagcagcgggggctcctacgagcagtacttc

SEQ ID NO: 271 - DNA, 42 bp, Human
tgcgccagcagcggaactagcgggagagatacgcagtatttt

SEQ ID NO: 272 - DNA, 48 bp, Human
tgcgccagcagccacgggtccgacggaccacaagagacccagtacttc

SEQ ID NO: 273 - DNA, 42 bp, Human
tgcgccagcagccacgggacagggagcggtggctacaccttc

SEQ ID NO: 274 - DNA, 45 bp, Human
tgtgccagcagtatcgggggtagcgggatcgagacccagtacttc

SEQ ID NO: 275 - DNA, 42 bp, Human
tgtgccagcagcttggcggggggggaggagacccagtacttc

SEQ ID NO: 276 - DNA, 42 bp, Human
tgcgccagcagcttggccggcggatacaatgagcagttcttc

SEQ ID NO: 277 - DNA, 42 bp, Human
tgcgccagcagcttggcagggggctacactgaagctttcttt

SEQ ID NO: 278 - DNA, 42 bp, Human
tgcgccagcagcttggcaggagggtacgttgagcagttcttc

SEQ ID NO: 279 - DNA, 48 bp, Human
tgtgccagcagcttagcagggttgattaacaccggggagctgtttttt

SEQ ID NO: 280 - DNA, 42 bp, Human
tgcgccagcagcttggcaggcagtgactatggctacaccttc

SEQ ID NO: 281 - DNA, 45 bp, Human
tgtgccagcagcttggccatgaggtaccaagagacccagtacttc

SEQ ID NO: 282 - DNA, 39 bp, Human
tgtgccagcagcttggccccagcctacgagcagtacttc

SEQ ID NO: 283 - DNA, 45 bp, Human
tgtgccagcagcttggccccgggagtggggaatgagcagttcttc

SEQ ID NO: 284 - DNA, 66 bp, Human
tgcgccagcagcttggcgagaggatggactagcgggctttttccttctctaaatgagcagttcttc

SEQ ID NO: 285 - DNA, 42 bp, Human
tgtgccagcagcttagctagcggggaagagacccagtacttc

SEQ ID NO: 286 - DNA, 39 bp, Human
tgcgccagcagcttggcgacggactacgagcagtacttc

SEQ ID NO: 287 - DNA, 42 bp, Human
tgcgccagcagcttggcgacaggatcctacgagcagtacttc

SEQ ID NO: 288 - DNA, 45 bp, Human
tgtgccagcagcttggccgtcgggagcgcagatacgcagtatttt

SEQ ID NO: 289 - DNA, 60 bp, Human
tgcgccagcagcttagcgtaccgggacagggtagcccttacttacaatgagcagttcttc

SEQ ID NO: 290 - DNA, 42 bp, Human
tgtgccagcagcttggcttacgttaactatggctactccttc

SEQ ID NO: 291 - DNA, 42 bp, Human
tgtgccagcagcttggcttacgttaactatggctacaccttc

SEQ ID NO: 292 - DNA, 36 bp, Human
tgcgccagcagcttggatgatagcattcagtacttc

SEQ ID NO: 293 - DNA, 48 bp, Human
tgcgccagcagcttggattttggaataaccgcagatacgcagtatttt

SEQ ID NO: 294 - DNA, 42 bp, Human
tgcgccagcagcttggatggcggaccctacgagcagtacttc

SEQ ID NO: 295 - DNA, 42 bp, Human
tgtgccagcagcctggacggaaacaatcagccccagcatttt

SEQ ID NO: 296 - DNA, 45 bp, Human
tgcgccagcagcttggacaactctggggccaacgtcctgactttc

SEQ ID NO: 297 - DNA, 42 bp, Human
tgtgccagcagcttggacagggcctgggaaacgcagtatttt

SEQ ID NO: 298 - DNA, 39 bp, Human
tgtgccagcagcttggacaggggggagacccagtacttc

SEQ ID NO: 299 - DNA, 39 bp, Human
tgcgccagcagcttggactcctgcaatgagcagttcttc

SEQ ID NO: 300 - DNA, 39 bp, Human
tgcgccagcagcttggactcctacaatgagcagttcttc

SEQ ID NO: 301 - DNA, 54 bp, Human
tgtgccagcagcttggaagctggcgggacagggtaccaagagacccagtacttc

SEQ ID NO: 302 - DNA, 45 bp, Human
tgcgccagcagcttggagggggcagggttgaatacgcagtatttt

SEQ ID NO: 303 - DNA, 45 bp, Human
tgtgccagcagcttggagggaccgggggacactgaagctttcttt

SEQ ID NO: 304 - DNA, 39 bp, Human
tgcgccagcagcttggaaggacaagagacccagtacttc

SEQ ID NO: 305 - DNA, 51 bp, Human
tgtgccagcagcttggagggcagcgggagggcctatcgagagcagttcttc

SEQ ID NO: 306 - DNA, 45 bp, Human
tgtgccagcagcttggagtctgccttgacagatacgcagtatttt

SEQ ID NO: 307 - DNA, 39 bp, Human
tgcgccagcagcttggagtccagggacgagcagtacttc

SEQ ID NO: 308 - DNA, 42 bp, Human
tgtgccagcagcttgtttagcgggagttacgagcagtacttc

SEQ ID NO: 309 - DNA, 51 bp, Human
tgtgccagcagcttgtttgtgcgggaggggtcctacaatgagcagttcttc

SEQ ID NO: 310 - DNA, 51 bp, Human
tgcgccagcagcttgggggcgggagggccttttggctacgagcagtacttc

SEQ ID NO: 311 - DNA, 54 bp, Human
tgcgccagcagcttgggagcgggaatccaaaaggggtacaatgagcagttcttc

SEQ ID NO: 312 - DNA, 48 bp, Human
tgcgccagcagcttgggtgacgggagctccacagatacgcagtatttt

SEQ ID NO: 313 - DNA, 48 bp, Human
tgtgccagcagcttgggggacagggggctgggagagacccagtacttc

SEQ ID NO: 314 - DNA, 45 bp, Human
tgtgccagcagcttgggggacagggacaactatgatgagttcttc

SEQ ID NO: 315 - DNA, 51 bp, Human
tgtgccagcagcttgggggggcctagcgggagttccggggagctgtttttt

SEQ ID NO: 316 - DNA, 48 bp, Human
tgtgccagcagcttggggggacagggactgaacactgaagctttcttt

SEQ ID NO: 317 - DNA, 48 bp, Human
tgcgccagcagcttgggtatcggtggctcctacaatgagcagttcttc

SEQ ID NO: 318 - DNA, 48 bp, Human
tgcgccagcagcttggggcctgattggcacaccggggagctgtttttt

SEQ ID NO: 319 - DNA, 48 bp, Human
tgcgccagcagcttgggaccggaccgtggggtcaatgagcagttcttc

SEQ ID NO: 320 - DNA, 42 bp, Human
tgcgccagcagcttgggaccgacactccatggctacaccttc

SEQ ID NO: 321 - DNA, 45 bp, Human
tgtgccagcagcttaggacagggctctggaaacaccatatatttt

SEQ ID NO: 322 - DNA, 42 bp, Human
tgtgccagcagcttgggcaggggctacgaaaaactgtttttt

SEQ ID NO: 323 - DNA, 51 bp, Human
tgtgccagcagcttggggcgactatcacatggcgcagatacgcagtatttt

SEQ ID NO: 324 - DNA, 48 bp, Human
tgcgccagcagcttgggaagcgctttctctggaaacaccatatatttt

SEQ ID NO: 325 - DNA, 48 bp, Human
tgtgccagcagcttggggtcaggggggtttggtactgaagctttcttt

SEQ ID NO: 326 - DNA, 60 bp, Human
tgcgccagcagcttgggttcaggggggaatccaagctctggggccaacgtcctgactttc

SEQ ID NO: 327 - DNA, 48 bp, Human
tgcgccagcagcttgggatcgggggggccttacactgaagctttcttt

SEQ ID NO: 328 - DNA, 54 bp, Human
tgtgccagcagcttgggttcccggccacgcttgaacaccggggagctgtttttt

SEQ ID NO: 329 - DNA, 48 bp, Human
tgcgccagcagcttggggacagggggcttgtacactgaagctttcttt

SEQ ID NO: 330 - DNA, 42 bp, Human
tgcgccagcagcttggggacagggggctatggctacaccttc

SEQ ID NO: 331 - DNA, 45 bp, Human
tgcgccagcagcctcgggacagggagggcagatacgcagtatttt

SEQ ID NO: 332 - DNA, 45 bp, Human
tgcgccagcagcttgggtacagggcgggacgatgagcagttcttc

SEQ ID NO: 333 - DNA, 45 bp, Human
tgcgccagcagcttggggaccaccgaactagcgggggagttcttc

SEQ ID NO: 334 - DNA, 42 bp, Human
tgtgccagcagccttgggacgtggaactacgagcagtacttc

SEQ ID NO: 335 - DNA, 48 bp, Human
tgtgccagcagcttgggggtagcgggaggtttgaacgagcagtacttc

SEQ ID NO: 336 - DNA, 45 bp, Human
tgtgccagcagcttgggtgtttcagggttgaagacccagtacttc

SEQ ID NO: 337 - DNA, 42 bp, Human
tgtgccagcagcttaggcgttagcgggagcgagcagtacttc

SEQ ID NO: 338 - DNA, 42 bp, Human
tgtgccagcagcttgggtgtgagttacactgaagctttcttt

SEQ ID NO: 339 - DNA, 48 bp, Human
tgcgccagcagcttggggtggcgggagacttacgatgagcacttcttc

SEQ ID NO: 340 - DNA, 48 bp, Human
tgcgccagcagcttggggtggcgggagacttacgatgagcagttcttc

SEQ ID NO: 341 - DNA, 48 bp, Human
tgcgccagcagcttggggtggcgggagacttacaatgagcagttcttc

SEQ ID NO: 342 - DNA, 54 bp, Human
tgtgccagcagcctcattcccgtgggggtaacgagttatcatgagcagttcttc

SEQ ID NO: 343 - DNA, 45 bp, Human
tgtgccagcagcttgttagcagggggaaactatggctacaccttc

SEQ ID NO: 344 - DNA, 45 bp, Human
tgcgccagcagcttgttggggggcttgggcactgaagctttcttt

SEQ ID NO: 345 - DNA, 48 bp, Human
tgcgccagcagcctcttggggagcgccaaatacaatgagcagttcttc

SEQ ID NO: 346 - DNA, 45 bp, Human
tgcgccagcagcctcttgaaggagaaggcagatacgcagtatttt

SEQ ID NO: 347 - DNA, 45 bp, Human
tgcgccagcagcttgttacgggagcatcaagatacgcagtatttt

SEQ ID NO: 348 - DNA, 45 bp, Human
tgcgccagcagcttgttacgggagcatcgagatacgcagtatttt

SEQ ID NO: 349 - DNA, 45 bp, Human
tgcgccagcagcctcttgagggagaaggcagatacgcagtatttt

SEQ ID NO: 350 - DNA, 45 bp, Human
tgcgccagcagcttgttgcgggaaagcacagatacgcagtatttt

SEQ ID NO: 351 - DNA, 45 bp, Human
tgtgccagcagcttgctatcgggagggggggagacccagtacttc

SEQ ID NO: 352 - DNA, 42 bp, Human
tgtgccagcagcctgatggagggtagctatggctacaccttc

SEQ ID NO: 353 - DNA, 45 bp, Human
tgcgccagcagcttgaatgcactagcggtgaatgagcagttcttc

SEQ ID NO: 354 - DNA, 39 bp, Human
tgtgccagcagcttgaatgaagaagagacccagtacttc

SEQ ID NO: 355 - DNA, 54 bp, Human
tgtgccagcagcttgcgagcggggtgggaagaagacacagatacgcagtatttt

SEQ ID NO: 356 - DNA, 45 bp, Human
tgtgccagcagcttacgggcgggagggctagacgagcagtacttc

SEQ ID NO: 357 - DNA, 48 bp, Human
tgcgccagcagcttgcgattatacagccataacactgaagctttcttt

SEQ ID NO: 358 - DNA, 39 bp, Human
tgtgccagcagcctacgacagtcccccgagcagtacttc

SEQ ID NO: 359 - DNA, 33 bp, Human
tgtgccagcagcttgcgcagggagcagttcttc

SEQ ID NO: 360 - DNA, 42 bp, Human
tgcgccagcagcttgtcagggggctacaatgagcagttcttc

SEQ ID NO: 361 - DNA, 48 bp, Human
tgtgccagcagcttatcgggactagcgggagttcgtgagcagttcttc

SEQ ID NO: 362 - DNA, 48 bp, Human
tgcgccagcagcttgtcgggcaggaaggtatcctacgagcagtacttc

SEQ ID NO: 363 - DNA, 36 bp, Human
tgtgccagcagcttaagcagggggcgagctttcttt

SEQ ID NO: 364 - DNA, 48 bp, Human
tgcgccagcagcttgtcgagcgatatctcccaagagacccagtacttc

SEQ ID NO: 365 - DNA, 36 bp, Human
tgtgccagcagcttaactgcctacgagcagtacttc

SEQ ID NO: 366 - DNA, 45 bp, Human
tgcgccagcagcttgaccgggggctcctacaatgagcagttcttc

SEQ ID NO: 367 - DNA, 39 bp, Human
tgtgccagcagcttggtgggggaaagggagcagttcttc

SEQ ID NO: 368 - DNA, 45 bp, Human
tgcgccagcagcttggttggcgggagattcgagacccagtacttc

SEQ ID NO: 369 - DNA, 39 bp, Human
tgcgccagcagcttggtggggatcgagacccagtacttc

SEQ ID NO: 370 - DNA, 33 bp, Human
tgtgccagcagcttggtacttgagcagttcttc

SEQ ID NO: 371 - DNA, 45 bp, Human
tgtgccagcagcttgtgggacggcggtgaagagacccagtacttc

SEQ ID NO: 372 - DNA, 48 bp, Human
tgcgccagcagcttgtggacccgtatttaccaagagacccagtacttc

SEQ ID NO: 373 - DNA, 48 bp, Human
tgcgccagcagcttgtatttgggggtgaggggacatgagcagttcttc

SEQ ID NO: 374 - DNA, 48 bp, Human
tgtgccagcagcttgtatcctttgagctcctacaatgagcagttcttc

SEQ ID NO: 375 - DNA, 45 bp, Human
tgtgccagcagcatgtttctggtgggggctgagacccagtacttc

SEQ ID NO: 376 - DNA, 36 bp, Human
tgcgccagcagtaatgacttcactgaagctttcttt

SEQ ID NO: 377 - DNA, 36 bp, Human
tgcgccagcagcccggccgactacgagcagtacttc

SEQ ID NO: 378 - DNA, 45 bp, Human
tgtgccagcagccccgcgggactagcggactacgagcagtacttc

SEQ ID NO: 379 - DNA, 42 bp, Human
tgtgccagcagccccgacgccagggacgatgagcagttcttc

SEQ ID NO: 380 - DNA, 39 bp, Human
tgcgccagcagccctttttacaacactgaagctttcttt

SEQ ID NO: 381 - DNA, 45 bp, Human
tgtgccagcagccccggacagggtctggtcaatgagcagttcttc

SEQ ID NO: 382 - DNA, 45 bp, Human
tgcgccagcagccccggacgggagaacaccggggagctgtttttt

SEQ ID NO: 383 - DNA, 42 bp, Human
tgcgccagcagccctgggacaggggtagccgagcagtacttc

SEQ ID NO: 384 - DNA, 42 bp, Human
tgtgccagcagcccagggtggggggcctacgagcagtacttc

SEQ ID NO: 385 - DNA, 48 bp, Human
tgtgccagcagcccgctagtagggggaacctacaatgagcagttcttc

SEQ ID NO: 386 - DNA, 45 bp, Human
tgtgccagcagccccccgacagggagggccggggagctgtttttt

SEQ ID NO: 387 - DNA, 42 bp, Human
tgcgccagcagtcctagcgggggttacaatgagcagttcttc

SEQ ID NO: 388 - DNA, 45 bp, Human
tgcgccagcagccccgtctcccctaccagggagacccagtacttc

SEQ ID NO: 389 - DNA, 48 bp, Human
tgtgccagcagcccttggggcggggggcgagccggggagctgtttttt

SEQ ID NO: 390 - DNA, 42 bp, Human
tgcgccagcagcccgtggactagcgggagggccgggttcttc

SEQ ID NO: 391 - DNA, 45 bp, Human
tgtgccagcagccagggacaccgctcctacaatgagcagttcttc

SEQ ID NO: 392 - DNA, 48 bp, Human
tgtgccagcagccagggactagcgggcccctacaatgagcagttcttc

SEQ ID NO: 393 - DNA, 42 bp, Human
tgtgccagcagccgcatagggggttcagatacgcagtatttt

SEQ ID NO: 394 - DNA, 57 bp, Human
tgcgccagcagccgaataccactaacaagcgggagggccgattgggagcagtacttc

SEQ ID NO: 395 - DNA, 45 bp, Human
tgcgccagcagccgaatgggacagggacggactgaagctttcttt

SEQ ID NO: 396 - DNA, 45 bp, Human
tgcgccagcagcaggaggggcgccgaccgtaatgagcagttcttc

SEQ ID NO: 397 - DNA, 42 bp, Human
tgcgccagcagctcagcgggaggctacaatgagcagttcttc

SEQ ID NO: 398 - DNA, 48 bp, Human
tgtgccagcagctccgagggcctctctggggccaacgtcctgactttc

SEQ ID NO: 399 - DNA, 42 bp, Human
tgcgccagcagctcgggacagggtacctacgagcagtacttc

SEQ ID NO: 400 - DNA, 48 bp, Human
tgtgccagcagctcagggacagacttttccacagatacgcagtatttt

SEQ ID NO: 401 - DNA, 45 bp, Human
tgtgccagcagctctatagcgggagctggcaatgagcagttcttc

SEQ ID NO: 402 - DNA, 36 bp, Human
tgtgccagcagctccatatccgagacccagtacttc

SEQ ID NO: 403 - DNA, 51 bp, Human
tgtgccagcagttctattgtctcgcgccctagcacagatacgcagtatttt

SEQ ID NO: 404 - DNA, 51 bp, Human
tgcgccagcagctccctgctagcggggatagacaccggggagctgtttttt

SEQ ID NO: 405 - DNA, 45 bp, Human
tgtgccagcagctccccaggacaggggacctacgagcagtacttc

SEQ ID NO: 406 - DNA, 39 bp, Human
tgcgccagcagctccccccctagtaatgagcagttcttc

SEQ ID NO: 407 - DNA, 48 bp, Human
tgtgccagcagctccccgactagcgggacctcctacgagcagtacttc

SEQ ID NO: 408 - DNA, 45 bp, Human
tgtgccagcagttctcagcgggagggcctctacgagcagtacttc

SEQ ID NO: 409 - DNA, 39 bp, Human
tgtgccagcagctctagcgaggcctacgagcagtacttc

SEQ ID NO: 410 - DNA, 42 bp, Human
tgcgccagcagctctagcggggcctacaatgagcagttcttc

SEQ ID NO: 411 - DNA, 48 bp, Human
tgtgccagcagctcctcaaaaaggatattgaacactgaagctttcttt

SEQ ID NO: 412 - DNA, 45 bp, Human
tgtgccagcagctcgactagcgggagtccagatacgcagtatttt

SEQ ID NO: 413 - DNA, 48 bp, Human
tgtgccagcagctcgactagcgtgagctcctacaatgagcagttcttc

SEQ ID NO: 414 - DNA, 39 bp, Human
tgtgccagcagcacgaggacggaggagacccagtacttc

SEQ ID NO: 415 - DNA, 42 bp, Human
tgcgccagcagtacttccggggcctacaatgagcagttcttc

SEQ ID NO: 416 - DNA, 48 bp, Human
tgcgccagcagcacgactagcgggaggaacaccggggagctgtttttt

SEQ ID NO: 417 - DNA, 42 bp, Human
tgcgccagcagcgtcgcgggatccacagatacgcagtatttt

SEQ ID NO: 418 - DNA, 33 bp, Human
tgcgccagcagcgtcggtgaggagcagtacttc

SEQ ID NO: 419 - DNA, 45 bp, Human
tgcgccagcagctgggccgggacagggggctatggctacaccttc

SEQ ID NO: 420 - DNA, 39 bp, Human
tgcgccagcagctgggacagggtctatgagcagttcttc

SEQ ID NO: 421 - DNA, 51 bp, Human
tgtgccagcagctgggggggggcctactcatcccaagagacccagtacttc

SEQ ID NO: 422 - DNA, 48 bp, Human
tgcgccagcagctggggggggcgggaaacttacaatgagcagttcttc

SEQ ID NO: 423 - DNA, 42 bp, Human
tgcgccagcagctgggggacaggggccggggagcagttcttc

SEQ ID NO: 424 - DNA, 42 bp, Human
tgcgccagcagctgggggacaggttccggtgaccagttcttc

SEQ ID NO: 425 - DNA, 42 bp, Human
tgcgccagcagctgggggacagggtccggtgagcagttcttc

SEQ ID NO: 426 - DNA, 48 bp, Human
tgtgccagcagctggaagggacgccgccgcacagatacgcagtatttt

SEQ ID NO: 427 - DNA, 42 bp, Human
tgtgccagcagctggtcagccgctaactatggctacaccttc

SEQ ID NO: 428 - DNA, 39 bp, Human
tgtgccagcagctatgggggcttctacgagcagtacttc

SEQ ID NO: 429 - DNA, 39 bp, Human
tgtgccagcagctacgggactgccactgaagctttcttt

SEQ ID NO: 430 - DNA, 42 bp, Human
tgcgccagcagctacgggacagggtccactgaagctttcttt

SEQ ID NO: 431 - DNA, 36 bp, Human
tgtgccagcagctacctcaatcagccccagcatttt

SEQ ID NO: 432 - DNA, 45 bp, Human
tgtgccagcaccaagacaggccttaagggggagacccagtacttc

SEQ ID NO: 433 - DNA, 42 bp, Human
tgcgccagcaccctggccggagcctacaatgagcagttcttc

SEQ ID NO: 434 - DNA, 42 bp, Human
tgcgccagcactccgggcggggggtacaatgagcagttcttc

SEQ ID NO: 435 - DNA, 42 bp, Human
tgtgccagcaccccccggggatccctaggggagctgtttttt

SEQ ID NO: 436 - DNA, 45 bp, Human
tgtgccacctcctttggggaccgggcctacaatgaccagttcttc

SEQ ID NO: 437 - DNA, 45 bp, Human
tgtgccaccagctttggggacagggcctacaatgagcagttcttc

SEQ ID NO: 438 - DNA, 42 bp, Human
tgtgccgtaaggaccgagggggcgatcaatgagcagttcttc

SEQ ID NO: 439 - DNA, 39 bp, Human
tgtgccggcagtggtacagagaacactgaagctttcttt

SEQ ID NO: 440 - DNA, 36 bp, Human
tgtgccattcgaggggatacctacgagcagtacttc

SEQ ID NO: 441 - DNA, 42 bp, Human
tgtgccatctcgtctcagggtttggaaaacgagcagtacttc

SEQ ID NO: 442 - DNA, 42 bp, Human
tgtgccagcgcgatagcgggagggataaatgagcagttcttc

SEQ ID NO: 443 - DNA, 51 bp, Human
tgtgccagcgcaaagcgtgtgggactagcggactacaatgagcagttcttc

SEQ ID NO: 444 - DNA, 45 bp, Human
tgtgccagcgcttcggggggggacagctcctacgagcagtacttc

SEQ ID NO: 445 - DNA, 21 bp, Human
tgtgccagtgaagctttcttt

SEQ ID NO: 446 - DNA, 36 bp, Human
tgtgccagcgaggcagttaatgaaaaactgtttttt

SEQ ID NO: 447 - DNA, 36 bp, Human
tgtgccagcggagccgggctgatgacccagtacttc

SEQ ID NO: 448 - DNA, 36 bp, Human
tgtgccagtggggacagggcaaacgagcagtacttc

SEQ ID NO: 449 - DNA, 39 bp, Human
tgtgccagcggcgggacagggggatatggctacaccttc

SEQ ID NO: 450 - DNA, 48 bp, Human
tgtgccagcggcagccccgggactagcggcggaaatgagcagttcttc

SEQ ID NO: 451 - DNA, 45 bp, Human
tgtgccagcatcgaccggacagggcccggggagacccagtacttc

SEQ ID NO: 452 - DNA, 45 bp, Human
tgtgccagcatcggactagcgggaggtatagatacgcagtatttt

SEQ ID NO: 453 - DNA, 39 bp, Human
tgtgccagcaagggaccaggggcagaggcccattacttc

SEQ ID NO: 454 - DNA, 39 bp, Human
tgtgccagcaagggaccaggggcagaggcccagtacttc

SEQ ID NO: 455 - DNA, 45 bp, Human
tgtgccagcaaactcggacaggttccgggtcagccccagcatttt

SEQ ID NO: 456 - DNA, 42 bp, Human
tgtgccagcaaattaacgacagccacctacgagcagtacttc

SEQ ID NO: 457 - DNA, 45 bp, Human
tgtgccagcaaatcttatcgcgggaacaccggggagctgtttttt

SEQ ID NO: 458 - DNA, 42 bp, Human
tgtgccagcaagtacagggggcctacctacgagcagtacttc

SEQ ID NO: 459 - DNA, 39 bp, Human
tgtgccagcctgcaggggaacacctacgagcagtacttc

SEQ ID NO: 460 - DNA, 42 bp, Human
tgtgccagcttgagttaccgggactacggggagctgtttttt

SEQ ID NO: 461 - DNA, 48 bp, Human
tgtgccagcatgtcggggcctttgagctacaccggggagctgtttttt

SEQ ID NO: 462 - DNA, 48 bp, Human
tgtgccagcatgtccgggcctatgacctacaccttcgagctgtgtttt

SEQ ID NO: 463 - DNA, 45 bp, Human
tgtgccagcaatccgctggggggaggagtggagacccagtacttc

SEQ ID NO: 464 - DNA, 42 bp, Human
tgtgccagcagagcgacagggggtcggcagccccagcatttt

SEQ ID NO: 465 - DNA, 45 bp, Human
tgtgccagcagagaggggggccaaccgctcgatacgcagtatttt

SEQ ID NO: 466 - DNA, 36 bp, Human
tgtgccagcaggggcggaatctatggctacaccttc

SEQ ID NO: 467 - DNA, 30 bp, Human
tgtgccagcagactagagacccagtacttc

SEQ ID NO: 468 - DNA, 42 bp, Human
tgtgccagcagattactagctgggtacaatgaccagttcttc

SEQ ID NO: 469 - DNA, 39 bp, Human
tgtgccagcagacccgacgagagggatacgcagtatttt

SEQ ID NO: 470 - DNA, 42 bp, Human
tgtgccagcagaccaggggcccccttgaacattcagtacttc

SEQ ID NO: 471 - DNA, 51 bp, Human
tgtgccagcagacaagcgttagcgggagggcttaccgatgagcagttcttc

SEQ ID NO: 472 - DNA, 39 bp, Human
tgtgccagccggagggacccctacaatgagcagttcttc

SEQ ID NO: 473 - DNA, 42 bp, Human
tgtgccagcaggaggatcgagggcaccggggagctgtttttt

SEQ ID NO: 474 - DNA, 39 bp, Human
tgtgcaagcaggtcgagggcgtcctacgagcagtacttc

SEQ ID NO: 475 - DNA, 48 bp, Human
tgtgccagcaggagtactagcgggagctcctacaatgagcagttcttc

SEQ ID NO: 476 - DNA, 45 bp, Human
tgtgccagcagaaccctcgggacagggtcagatacgcagtatttt

SEQ ID NO: 477 - DNA, 48 bp, Human
tgtgccagcagagttaagagaggactagcagaagatacgcagtatttt

SEQ ID NO: 478 - DNA, 42 bp, Human
tgtgccagcagggtaaaccgggctgagtatggctacaccttc

SEQ ID NO: 479 - DNA, 39 bp, Human
tgtgccagctcagcggacagggaatacgagcagtacttc

SEQ ID NO: 480 - DNA, 42 bp, Human
tgtgccagcagtgccctcgagaggtacaatgagcagttcttc

SEQ ID NO: 481 - DNA, 33 bp, Human
tgtgccagcagtgccagggacgagcagtacttc

SEQ ID NO: 482 - DNA, 42 bp, Human
tgtgccagcagtgcccgggacggagcctacgagcagtacttc

SEQ ID NO: 483 - DNA, 42 bp, Human
  misc_feature (24)..(24): n is a, c, g, or t
tgtgccagcagttgcacggggctnagagatacccagtatttt

SEQ ID NO: 484 - DNA, 42 bp, Human
tgtgccagcagtgacgcggaaagcgccgaccagcactacttc

SEQ ID NO: 485 - DNA, 42 bp, Human
tgtgccagcagtgacgaggacagcgccgaccagcactacttc

SEQ ID NO: 486 - DNA, 42 bp, Human
tgtgccagcagtgacgaggaaagcgccgaccagcagtacttt

SEQ ID NO: 487 - DNA, 45 bp, Human
tgtgccagcagtgatttcgggggaggggccaacgtcctgactttc

SEQ ID NO: 488 - DNA, 42 bp, Human
tgtgccagcagtgacggggacaggacctaccaccagtacttc

SEQ ID NO: 489 - DNA, 48 bp, Human
tgtgccagcagtgatggagggtgggggtcctacaatgagcagttcttc

SEQ ID NO: 490 - DNA, 36 bp, Human
tgtgccagcagtgacctctttgaaaaactgtttttt

SEQ ID NO: 491 - DNA, 45 bp, Human
tgtgccagcagcgacccccccgcagggttcgacattcagtacttc

SEQ ID NO: 492 - DNA, 51 bp, Human
tgtgccagcagtgacaggggccctatctctggggccaacgtcctgactttc

SEQ ID NO: 493 - DNA, 36 bp, Human
tgtgccagcagtgatagcgccaatgagcagttcttc

SEQ ID NO: 494 - DNA, 45 bp, Human
tgtgccagcagtgactctagcccaaacaccggggagctgtttttt

SEQ ID NO: 495 - DNA, 39 bp, Human
tgtgccagcagtgatacagagaacactgaagatttcttt

SEQ ID NO: 496 - DNA, 40 bp, Human
tgtgccagcagtgaggctgagggggcttcctacgagcagt

SEQ ID NO: 497 - DNA, 51 bp, Human
tgtgccagcagtgaagccttcggtggtgccctgggacagccccagcatttt

SEQ ID NO: 498 - DNA, 36 bp, Human
tgtgccagcagtgaagcgggcgtggagctgtttttt

SEQ ID NO: 499 - DNA, 48 bp, Human
tgtgccagcagtgaagcgcaggggggccccacagatacgcagtatttt

SEQ ID NO: 500 - DNA, 48 bp, Human
tgtgccagcagtgaagcgcaggggggccgcaccgatacgcagtttttt

SEQ ID NO: 501 - DNA, 51 bp, Human
tgtgccagcagtgaagcccgggaccgtctggcggtctatggctacaccttc

SEQ ID NO: 502 - DNA, 45 bp, Human
tgtgccagcagtgaagctagcgggagctcctacgagcagtacttc

SEQ ID NO: 503 - DNA, 48 bp, Human
tgtgccagcagtgaagatcccccgggactagcggccgagcagtacttc

SEQ ID NO: 504 - DNA, 51 bp, Human
tgtgccagcagtgaagatagtctagcggggcagaacaatgagcagttcttc

SEQ ID NO: 505 - DNA, 48 bp, Human
tgtgccagcagtgaagataccgggacaggatcctacgagcagtacttc

SEQ ID NO: 506 - DNA, 48 bp, Human
tgtgccagcagtgaagagagggacagggggcaggacgagtactacttc

SEQ ID NO: 507 - DNA, 48 bp, Human
tgtgccagcagtgaagaggtcaaccctggggccaacgtcctgactttc

SEQ ID NO: 508 - DNA, 48 bp, Human
tgtgccagcagtgaattttcgtcggggggcaagcatggctacaccttc

SEQ ID NO: 509 - DNA, 48 bp, Human
tgtgccagcagtgaaggagacagctctggggccaacgtcctgactttc

SEQ ID NO: 510 - DNA, 42 bp, Human
tgtgccagcagtgagggggacagcccctacgagcagtacttc

SEQ ID NO: 511 - DNA, 60 bp, Human
tgtgccagcagtgaggggggggctagtcaagtgtcgggggtcaaaaacattcagtacttc

SEQ ID NO: 512 - DNA, 45 bp, Human
tgtgccagcagtgaagggcaggtgtcccaagagacccagtacttc

SEQ ID NO: 513 - DNA, 45 bp, Human
tgtgccagcagtgaactagcgggagacacagatacgcagtatttt

SEQ ID NO: 514 - DNA, 48 bp, Human
tgtgccagcagtgaactagcgggagggccccaagagacccagtacttc

SEQ ID NO: 515 - DNA, 51 bp, Human
tgtgccagcagtgaactaggacgcttctctggggccaacgtcctgactttc

SEQ ID NO: 516 - DNA, 45 bp, Human
tgtgccagcagtgaacgggccggaggatcggagacccagtacttc

SEQ ID NO: 517 - DNA, 42 bp, Human
tgtgccagcagtgagcgagggcccaatcagccccagcatttt

SEQ ID NO: 518 - DNA, 45 bp, Human
tgtgccagcagtgaaaggacaggtgggaacactgaagctttcttt

SEQ ID NO: 519 - DNA, 39 bp, Human
tgtgccagcagtgaaacagacaacactgaagctttcttt

SEQ ID NO: 520 - DNA, 42 bp, Human
tgtgccagcagtgaaacggacaggggtcacgagcagtacttc

SEQ ID NO: 521 - DNA, 42 bp, Human
tgtgccagcagtgagacgggagggtatggcgagcagtacttc

SEQ ID NO: 522 - DNA, 38 bp, Human
tgtgccagcagtgagaccatctcctacgagcagtactt

SEQ ID NO: 523 - DNA, 42 bp, Human
tgtgccagcagtgagactagcgggagggagactgacttcttc

SEQ ID NO: 524 - DNA, 45 bp, Human
tgtgccagcagtgaagtatcgggtagtggaaacaccatatatttt

SEQ ID NO: 525 - DNA, 45 bp, Human
tgtgccagcagctttctaacagacttccaagagacccagtacttc

SEQ ID NO: 526 - DNA, 42 bp, Human
tgtgccagcagttttcccggtgtagtagagacccagtacttc

SEQ ID NO: 527 - DNA, 45 bp, Human
tgtgccagcagtggggagcgggaggggaggtacgagcagtacttc

SEQ ID NO: 528 - DNA, 42 bp, Human
tgtgccagcagtggactagcggattacaatgagcagttcttc

SEQ ID NO: 529 - DNA, 42 bp, Human
tgtgccagcagtggacagcccatgaacactgaagctttcttt

SEQ ID NO: 530 - DNA, 45 bp, Human
tgtgccagcagtggccgggacacagctgcctacgagcagtacttc

SEQ ID NO: 531 - DNA, 39 bp, Human
tgtgccagcagtggtacagagaacactgaagctttcttt

SEQ ID NO: 532 - DNA, 45 bp, Human
tgtgccagcagccacgctcatgagggagcggatacgcagtatttt

SEQ ID NO: 533 - DNA, 45 bp, Human
tgtgccagcagtcacctcggggacggaacagatacgcagtatttt

SEQ ID NO: 534 - DNA, 39 bp, Human
tgtgccagcagccataaccctaactatggctacaccttc

SEQ ID NO: 535 - DNA, 51 bp, Human
tgtgccagcagccaccgggggcggggggacccccacactttcggttttttt

SEQ ID NO: 536 - DNA, 42 bp, Human
tgtgccagcagtcactcaaggagcggggaccatttatccttc

SEQ ID NO: 537 - DNA, 42 bp, Human
tgtgccagcagtattgactctcaagccggggagctgtttttt

SEQ ID NO: 538 - DNA, 45 bp, Human
tgtgccagcagcattagcgggagccactcctacgagcagtacttc

SEQ ID NO: 539 - DNA, 42 bp, Human
tgtgccagcagtatctcaaggatcggggacaatctgtacttc

SEQ ID NO: 540 - DNA, 42 bp, Human
tgtgccagcagtatctcaaggaccggggacaatctgtacttc

SEQ ID NO: 541 - DNA, 45 bp, Human
tgtgccagcagtaagggggcaggggccgcctacggctacaccttc

SEQ ID NO: 542 - DNA, 45 bp, Human
tgtgccagcagtaaataccctgggggcagaaacaccatatatttt

SEQ ID NO: 543 - DNA, 39 bp, Human
tgtgccagcagcctagcgggagtttacgagcagtacttc

SEQ ID NO: 544 - DNA, 45 bp, Human
tgtgccagcagtttgggactagcggggaacaatgagcagttcttc

SEQ ID NO: 545 - DNA, 42 bp, Human
tgtgccagcagtttgggacagggggcaaacaccatatatttt

SEQ ID NO: 546 - DNA, 42 bp, Human
tgtgccagcagcctgggacagcaccaagagacccagtacttc

SEQ ID NO: 547 - DNA, 42 bp, Human
tgtgccagcagtctcgggactccccgggatgagcagttcttc

SEQ ID NO: 548 - DNA, 48 bp, Human
tgtgccagcagtttaatccgacagggttggggctatggctacaccttc

SEQ ID NO: 549 - DNA, 45 bp, Human
tgtgccagcagtttgctagcgggagaaaacgacgagcagtacttc

SEQ ID NO: 550 - DNA, 30 bp, Human
tgtgccagcagtctcaggacccagcatttt

SEQ ID NO: 551 - DNA, 42 bp, Human
tgtgccagcagtctctccgggaccggggacaatctgtccttc

SEQ ID NO: 552 - DNA, 39 bp, Human
tgtgccagcagtctaagctcctacaatgagcagttcttc

SEQ ID NO: 553 - DNA, 42 bp, Human
tgtgccagctccaacagggggccgaatcagccccagcatttt

SEQ ID NO: 554 - DNA, 42 bp, Human
tgtgccagcagtccagcgggagaggggtacgagcagtacttc

SEQ ID NO: 555 - DNA, 39 bp, Human
tgtgccagcagtccagacagagcagagacccagtacttc

SEQ ID NO: 556 - DNA, 48 bp, Human
tgtgccagcagcccggagtccgtccgaggaggaaacaccatatatttt

SEQ ID NO: 557 - DNA, 36 bp, Human
tgtgccagcagtcctggggccaacgtcctgactttc

SEQ ID NO: 558 - DNA, 42 bp, Human
tgtgccagcagtcccggggggggggacgactatcagtacttc

SEQ ID NO: 559 - DNA, 36 bp, Human
tgtgccagcagccccggggggggaaaactgtttttt

SEQ ID NO: 560 - DNA, 42 bp, Human
tgtgccagcagtcccgggggggggaacgaccaccagtacttc

SEQ ID NO: 561 - DNA, 42 bp, Human
tgtgccagcagtcccgggggggggaactaccagcagtacttc

SEQ ID NO: 562 - DNA, 45 bp, Human
tgtgccagcagccccgggccggggccggggaatgagcagttcttc

SEQ ID NO: 563 - DNA, 45 bp, Human
tgtgccagcagtccgggacagggggggatcaatgagcagttcttc

SEQ ID NO: 564 - DNA, 42 bp, Human
tgtgccagcagtccgggacagggcaactacgagcagtacttc

SEQ ID NO: 565 - DNA, 42 bp, Human
tgtgccagcagtccgggacagggcaactacaagcagtacttc

SEQ ID NO: 566 - DNA, 45 bp, Human
tgtgccagcagtccagggacagggatctacaatgagcagttcttc

SEQ ID NO: 567 - DNA, 48 bp, Human
tgtgccagcagtccaatagcgggagggcctggggatacgcagtatttt

SEQ ID NO: 568 - DNA, 48 bp, Human
tgtgccagcagcccgattaacagggggcaccaagagacccagtacttc

SEQ ID NO: 569 - DNA, 48 bp, Human
tgtgccagcagtcccaaggcggcggggatcaatgaaaaactgtttttt

SEQ ID NO: 570 - DNA, 45 bp, Human
tgtgccagcagcccactagcggaaccgacagatacgcagtatttt

SEQ ID NO: 571 - DNA, 48 bp, Human
tgtgccagcagtcccctgagcgggaggcacgcggatacgcagtatttt

SEQ ID NO: 572 - DNA, 45 bp, Human
tgtgccagcagtcctccgggacctaagatagatacgcagtatttt

SEQ ID NO: 573 - DNA, 42 bp, Human
tgtgccagcagtccctcagggctcctcgcgccccagcatttt

SEQ ID NO: 574 - DNA, 45 bp, Human
tgtgccagcagcccctcgacagggagtctgggcgagcagtacttc

SEQ ID NO: 575 - DNA, 45 bp, Human
tgtgccagcagtcctaccgggacaggggcgggagagcagtacttc

SEQ ID NO: 576 - DNA, 48 bp, Human
tgtgccagcagtcaaggacaggggaggttgacagatacgcagtatttt

SEQ ID NO: 577 - DNA, 45 bp, Human
tgtgccagcagccaaaaacccgggccctgggaagtggagaccttc

SEQ ID NO: 578 - DNA, 45 bp, Human
tgtgccagcagccgattggagggactctacaatgagcagttcttc

SEQ ID NO: 579 - DNA, 39 bp, Human
tgtgccagcagccggactagtatccatgagcagttcttc

SEQ ID NO: 580 - DNA, 36 bp, Human
tgtgccagcagccgtactagtgtgagggccctcttc

SEQ ID NO: 581 - DNA, 33 bp, Human
tgtgccagcagctccgcatgggagcagtacttc

SEQ ID NO: 582 - DNA, 42 bp, Human
tgtgccagcagttccgaacgggccaggtgccaacaatacttc

SEQ ID NO: 583 - DNA, 39 bp, Human
tgtgccagcagttccggggcaacctacgagcagtacttc

SEQ ID NO: 584 - DNA, 39 bp, Human
tgtgccagcagttccgggggaacctacgagcagtacttc

SEQ ID NO: 585 - DNA, 42 bp, Human
tgtgccagcagttcaggacacatgaacactgaagctttcttt

SEQ ID NO: 586 - DNA, 42 bp, Human
tgtgccagcagttcgggactaggtttcaatgagcagttcttc

SEQ ID NO: 587 - DNA, 48 bp, Human
tgtgccagcagctcaggacagggaggatcctacaatgatcagttcttc

SEQ ID NO: 588 - DNA, 45 bp, Human
tgtgccagcagctccgggacaggggcgggagagacccagtacttc

SEQ ID NO: 589 - DNA, 51 bp, Human
tgtgccagcagttccgggactagcggggatttttacaatgagcagttcttc

SEQ ID NO: 590 - DNA, 42 bp, Human
tgtgccagcagttccctccctctggcagatacgcagtatttt

SEQ ID NO: 591 - DNA, 57 bp, Human
tgtgccagcagttctctctccgggactagcgggaaaacagggtacgagcagtacttc

SEQ ID NO: 592 - DNA, 42 bp, Human
tgtgccagcagttcctcggtgaatggaaacaccatatatttt

SEQ ID NO: 593 - DNA, 39 bp, Human
tgtgccagcagctcaacaggggacactgaagctttcttt

SEQ ID NO: 594 - DNA, 39 bp, Human
tgtgccagcagtacagggttccgagatacgcagtatttt

SEQ ID NO: 595 - DNA, 39 bp, Human
tgtgccagcagtactacagggggaaagggctacaccttc

SEQ ID NO: 596 - DNA, 51 bp, Human
tgtgccagcagtgtcaaggggctagttagggagtacaatgagcagttcttc

SEQ ID NO: 597 - DNA, 42 bp, Human
tgtgccagcagtgtcccgggactagcgggagagcagttcttc

SEQ ID NO: 598 - DNA, 42 bp, Human
tgtgccagcagtgtacaaaactcctacaatgagcagttcttc

SEQ ID NO: 599 - DNA, 39 bp, Human
tgtgccagcagtgtgagggagaacactgaagctttcttt

SEQ ID NO: 600 - DNA, 42 bp, Human
tgtgccagcagttgggccgggactacgaatgagcagttcttc

SEQ ID NO: 601 - DNA, 39 bp, Human
tgtgccagcagttgggggatgggagagacccagtacttc

SEQ ID NO: 602 - DNA, 42 bp, Human
tgtgccagcagttggaggactagcggttacgagcagtacttc

SEQ ID NO: 603 - DNA, 42 bp, Human
tgtgccagcagttggacagggcttacagatacgcagtatttt

SEQ ID NO: 604 - DNA, 45 bp, Human
tgtgccagcagttacgccgacagggaagtacagccccagcatttt

SEQ ID NO: 605 - DNA, 48 bp, Human
tgtgccagcagttacgcggacactttctcctacaatgagcagttcttc

SEQ ID NO: 606 - DNA, 36 bp, Human
tgtgccagcagttacgcaggggctgagcagttcttc

SEQ ID NO: 607 - DNA, 45 bp, Human
tgtgccagcagttacgcgacaggggaggggtcacccctccacttt

SEQ ID NO: 608 - DNA, 51 bp, Human
tgtgccagcagttacgcctacagggagacaactaatgaaaaactgtttttt

SEQ ID NO: 609 - DNA, 42 bp, Human
tgtgccagcagttactttgagatggaagagacccagtacttc

SEQ ID NO: 610 - DNA, 39 bp, Human
tgtgccagcagttatttcctgaacactgaagctttcttt

SEQ ID NO: 611 - DNA, 54 bp, Human
tgtgccagcagttacttctcccccggactagcgggagaagagacccagtacttc

SEQ ID NO: 612 - DNA, 42 bp, Human
tgtgccagcagttacggggcggggggatacgagcagtacttc

SEQ ID NO: 613 - DNA, 48 bp, Human
tgtgccagcagttacggggccccaccccagtacaatgagcagttcttc

SEQ ID NO: 614 - DNA, 45 bp, Human
tgtgccagcagttacggggctagcggttcagatacctactatttt

SEQ ID NO: 615 - DNA, 42 bp, Human
tgtgccagcagttacggggactactcctacgagcagtacttc

SEQ ID NO: 616 - DNA, 42 bp, Human
tgtgccagcagttacggggactactcctaccagcagtacttc

SEQ ID NO: 617 - DNA, 48 bp, Human
tgtgccagcagttacggactagcggtaaacaccggggagctgtttttt

SEQ ID NO: 618 - DNA, 45 bp, Human
tgtgccagcagttacgggcaaacgattaactatggctacaccttc

SEQ ID NO: 619 - DNA, 48 bp, Human
tgtgccagcagttacggccgcgcgcgggagcccctatggtggtacttc

SEQ ID NO: 620 - DNA, 42 bp, Human
tgtgccagcagttacggcaggagtaactatggctacaccttc

SEQ ID NO: 621 - DNA, 39 bp, Human
tgtgccagcagttacggacgggtcaatgagcagttcttc

SEQ ID NO: 622 - DNA, 39 bp, Human
tgtgccagcagttacggcagcacctacgagcagtacttc

SEQ ID NO: 623 - DNA, 48 bp, Human
tgtgccagcagttacgggacaggggaagtcaccggggagctgtttttt

SEQ ID NO: 624 - DNA, 48 bp, Human
tgtgccagcagttacggtacagggacgattcattcacccctccacttt

SEQ ID NO: 625 - DNA, 45 bp, Human
tgtgccagcagttacgggaccagcgcctcccatacgcactttttt

SEQ ID NO: 626 - DNA, 45 bp, Human
tgtgccagcagttacgggactagcggttcagatacgcagtatttt

SEQ ID NO: 627 - DNA, 36 bp, Human
tgtgccagcagttacggcgtctacgagcagtacttc

SEQ ID NO: 628 - DNA, 39 bp, Human
tgtgccagcagttacatacagaattcacccctccacttt

SEQ ID NO: 629 - DNA, 45 bp, Human
tgtgccagcagttatctagcgggaaacacagatacgcagtatttt

SEQ ID NO: 630 - DNA, 45 bp, Human
tgtgccagcagttacctcggggggtcgaacactgaagctttcttt

SEQ ID NO: 631 - DNA, 39 bp, Human
tgtgccagcagttacttgggacagggagagcagtacttc

SEQ ID NO: 632 - DNA, 54 bp, Human
tgtgccagcagttacctgactctagcgggagggccccaagagacccagtacttc

SEQ ID NO: 633 - DNA, 51 bp, Human
tgtgccagcagttacaacccgacatcaggagccaaaaacattcagtacttc

SEQ ID NO: 634 - DNA, 51 bp, Human
tgtgccagcagttaccccggacagggggcccacaccggggagctgtttttt

SEQ ID NO: 635 - DNA, 42 bp, Human
tgtgccagcagttaccaggacagggggtacgagcagtacttc

SEQ ID NO: 636 - DNA, 48 bp, Human
tgtgccagcagttaccaggggtgggggcccaatcagccccagcatttt

SEQ ID NO: 637 - DNA, 24 bp, Human
tgtgccagcagttacagggatgag

SEQ ID NO: 638 - DNA, 42 bp, Human
tgtgccagcagttatagggacctcccctaccaacaatacttc

SEQ ID NO: 639 - DNA, 45 bp, Human
tgtgccagcagttatcgggactcgtactacaatgagcagttcttc

SEQ ID NO: 640 - DNA, 42 bp, Human
tgtgccagcagttatagggacgtcgcctacgagcagtacttc

SEQ ID NO: 641 - DNA, 42 bp, Human
tgtgccagcagttatagggacgtcccctacgagcagtacttc

SEQ ID NO: 642 - DNA, 42 bp, Human
tgtgccagcagttatagggacgtcccctaccaacagtacttc

SEQ ID NO: 643 - DNA, 42 bp, Human
tgtgccagcagttaccgtggacaggggaacgagcagtacttc

SEQ ID NO: 644 - DNA, 45 bp, Human
tgtgccagcagttaccgcggcagggttttggacgagcagtacttc

SEQ ID NO: 645 - DNA, 45 bp, Human
tgtgccagcagttaccgacaagatagcaatcagccccagcatttt

SEQ ID NO: 646 - DNA, 42 bp, Human
tgtgccagcagttaccgacaggggacctacgagcagtacttc

SEQ ID NO: 647 - DNA, 51 bp, Human
tgtgccagcagttaccgccaatacacatccgacggttacgagcagtacttc

SEQ ID NO: 648 - DNA, 42 bp, Human
tgtgccagcagttaccggtggggtgtggatacccagtatttt

SEQ ID NO: 649 - DNA, 36 bp, Human
tgtgccagcagttactcggcgggggagcagttcttc

SEQ ID NO: 650 - DNA, 36 bp, Human
tgtgccagcagttactcggacgagacccagtacttc

SEQ ID NO: 651 - DNA, 48 bp, Human
tgtgccagcagttactctggggacagtcaggtatcacccctccacttt

SEQ ID NO: 652 - DNA, 54 bp, Human
tgtgccagcagttactcgggcggagagcgggagggccgggatgagcagttcttc

SEQ ID NO: 653 - DNA, 45 bp, Human
tgtgccagcagttactcgggaggaaatggaaacaccatatatttt

SEQ ID NO: 654 - DNA, 42 bp, Human
tgtgccagcagttactctgggcccctttacgagcagtacttc

SEQ ID NO: 655 - DNA, 42 bp, Human
tgtgccagcagttactcagggaggggctatgattactccttc

SEQ ID NO: 656 - DNA, 48 bp, Human
tgtgccagcagttactcgggccgacggcccctggacgagcagtacttc

SEQ ID NO: 657 - DNA, 51 bp, Human
tgtgccagcagttactcgaaggcaggggggagaggaaacaccatatatttt

SEQ ID NO: 658 - DNA, 45 bp, Human
tgtgccagcagttactccttagggggaagcactgaagctttcttt

SEQ ID NO: 659 - DNA, 42 bp, Human
tgtgccagcagttactcgccagacacagatacgcagtatttt

SEQ ID NO: 660 - DNA, 48 bp, Human
tgtgccagcagttactccccgactagcggcccctgggagcagtacttc

SEQ ID NO: 661 - DNA, 42 bp, Human
tgtgccagcagttactctcagggggagaatgagcagttcttc

SEQ ID NO: 662 - DNA, 45 bp, Human
tgtgccagcagttactctcagctagctaactatggctacaccttc

SEQ ID NO: 663 - DNA, 48 bp, Human
tgtgccagcagttactcccaacgggacgatccctacgagcagtacttc

SEQ ID NO: 664 - DNA, 51 bp, Human
tgtgccagcagttactcgagagacaggccctcctacaatgagcagttcttc

SEQ ID NO: 665 - DNA, 45 bp, Human
tgtgccagcagttactctcgtgaaaacaccggggagctgtttttt

SEQ ID NO: 666 - DNA, 45 bp, Human
tgtgccagcagttactcaaggcagggtgaaaacattcagtacttc

SEQ ID NO: 667 - DNA, 45 bp, Human
tgtgccagcagttactcgagacagggtgggcagccccagcatttt

SEQ ID NO: 668 - DNA, 48 bp, Human
tgtgccagcagttattctcgagtagcgggattcaatgagcagttcttc

SEQ ID NO: 669 - DNA, 39 bp, Human
tgtgccagcagttactctcgctacaatgagcagttcttc

SEQ ID NO: 670 - DNA, 39 bp, Human
tgtgccagcagttactcgtcgggcactgaagctttcttt

SEQ ID NO: 671 - DNA, 48 bp, Human
tgtgccagcagttactcttctagcgatagctcctacgagcagtacttc

SEQ ID NO: 672 - DNA, 54 bp, Human
tgtgccagcagttactcctcggttccgacagggttatcctatggctacaccttc

SEQ ID NO: 673 - DNA, 42 bp, Human
tgtgccagcagttactcgacagagtctcgcgagcagtacttc

SEQ ID NO: 674 - DNA, 45 bp, Human
tgtgccagcagttactcggtagggacagagtcacccctccacttt

SEQ ID NO: 675 - DNA, 42 bp, Human
tgtgccagcagttactcggtcagcaatcagccccagcatttt

SEQ ID NO: 676 - DNA, 54 bp, Human
tgtgccagcagttacactccacagagtagcgggaggtccggtgagcagttcttc

SEQ ID NO: 677 - DNA, 39 bp, Human
tgtgccagcagttacgtagggggcactgaagctttcttt

SEQ ID NO: 678 - DNA, 42 bp, Human
tgtgccagcagttacgtaactacaaaagagacccagtacttc

SEQ ID NO: 679 - DNA, 42 bp, Human
tgtgccagcagttactgggagggggcttacgagcagtacttc

SEQ ID NO: 680 - DNA, 45 bp, Human
tgtgccagcagttactatgggagggaaaccggggagctgtttttt

SEQ ID NO: 681 - DNA, 39 bp, Human
tgtgccagcacggcgggaacctacaatgagcagttcttc

SEQ ID NO: 682 - DNA, 45 bp, Human
tgtgccagcactgatttttacggcgggaggcatggctacaccttc

SEQ ID NO: 683 - DNA, 48 bp, Human
tgtgccagcaccgatcctttgacaggcatgaacactgaagctttcttt

SEQ ID NO: 684 - DNA, 39 bp, Human
tgtgccagcaccgaggacccgagggagccccagcatttt

SEQ ID NO: 685 - DNA, 51 bp, Human
tgtgccagcacccaccggggaaagggggattctgacactttaggtttcttt

SEQ ID NO: 686 - DNA, 36 bp, Human
tgtgccagcaccctgacaggttatggctacaccttc

SEQ ID NO: 687 - DNA, 48 bp, Human
tgtgccagcaccatgctagcgggagttgaaaccggggagctgtttttt

SEQ ID NO: 688 - DNA, 42 bp, Human
tgtgccagcacccctctggggactagcggcgagcagttcttc

SEQ ID NO: 689 - DNA, 42 bp, Human
tgtgccagcaccccacgggagcgcccctccgagcagtacttc

SEQ ID NO: 690 - DNA, 45 bp, Human
tgtgccagcaccccgtccggggcctggcaagagacccagtacttc

SEQ ID NO: 691 - DNA, 36 bp, Human
tgtgccagcacccagggtggggccgagctgtttttt

SEQ ID NO: 692 - DNA, 42 bp, Human
tgtgccagcacacgggactctagcacagatacgcagtatttt

SEQ ID NO: 693 - DNA, 51 bp, Human
tgtgccagcacccgtccgggacagggggcttctgacactgaagctttcttt

SEQ ID NO: 694 - DNA, 36 bp, Human
tgtgccagcacttccggcctccgggagctgtttttt

SEQ ID NO: 695 - DNA, 39 bp, Human
tgtgccagcaccacggggttgaacactgaagctttcttt

SEQ ID NO: 696 - DNA, 42 bp, Human
tgtgccagcaccgtgggacagggggcgtgggagcagtacttc

SEQ ID NO: 697 - DNA, 42 bp, Human
tgtgccagctgggacgccctggacccagatacgcagtatttt

SEQ ID NO: 698 - DNA, 42 bp, Human
tgtgccactgaggggcgtttggtgaacactgaagctttcttt

SEQ ID NO: 699 - DNA, 45 bp, Human
tgtgccatcagcatatccgccgggagcccagatacccaatatttt

SEQ ID NO: 700 - DNA, 48 bp, Human
tgtgccccaaggaaccggacagggggagatctccacgagcagtacttc

SEQ ID NO: 701 - DNA, 39 bp, Human
tgtgcctccggacggagctcctacaatgagcagttcttc

SEQ ID NO: 702 - DNA, 39 bp, Human
tgtgccagcaggttcgagggcggagagacccagtacttc

SEQ ID NO: 703 - DNA, 42 bp, Human
tgtgccagcagaggacaggggaacaccggggagctgtttttt

SEQ ID NO: 704 - DNA, 39 bp, Human
tgtgccagcagaaccgggaactgggagacccagtacttc

SEQ ID NO: 705 - DNA, 39 bp, Human
tgtgccagcagcgagggggcggcctacgagcagtacttc

SEQ ID NO: 706 - DNA, 45 bp, Human
tgtgccagcagcttcctagcgggggttttgaatgagcagttcttc

SEQ ID NO: 707 - DNA, 45 bp, Human
tgtgccagcagctttatggcgagctcctacaatgagcagttcttc

SEQ ID NO: 708 - DNA, 42 bp, Human
tgtgccagcagcttcaacgggagaaccggggagctgtttttt

SEQ ID NO: 709 - DNA, 48 bp, Human
tgtgccagcagcttccgacagggcagtgacaccggggagctgtttttt

SEQ ID NO: 710 - DNA, 39 bp, Human
tgtgccagcagcggggtgttggttgatacgcagtatttt

SEQ ID NO: 711 - DNA, 39 bp, Human
tgtgccagcagccacggggggtcagatacgcagtatttt

SEQ ID NO: 712 - DNA, 48 bp, Human
tgtgccagcagccacatagcgggagggtcctacaatgagcagttcttc

SEQ ID NO: 713 - DNA, 39 bp, Human
tgtgccagcagcttagcgggcgggcacggctacaccttc

SEQ ID NO: 714 - DNA, 42 bp, Human
tgtgccagcagcttagcgctaggggggccagagcagtacttc

SEQ ID NO: 715 - DNA, 57 bp, Human
tgtgccagcagcttagcgttgggactagcgggagggcccacagatacgcagtatttt

SEQ ID NO: 716 - DNA, 51 bp, Human
tgtgccagcagcttagcctcggacagggcccccgagaatgagcagttcttc

SEQ ID NO: 717 - DNA, 42 bp, Human
tgtgccagcagcttagacgggggaggagggggctacaccttc

SEQ ID NO: 718 - DNA, 45 bp, Human
tgtgccagcagcttagacgggcgggatgtagatacgcagtatttt

SEQ ID NO: 719 - DNA, 39 bp, Human
tgtgccagcagcttagatccgcaagagacccagtacttc

SEQ ID NO: 720 - DNA, 42 bp, Human
tgtgccagcagcttagacagaaacaccggggagctgtttttt

SEQ ID NO: 721 - DNA, 51 bp, Human
tgtgccagcagcttagaccggtgggatgggagcacagatacgcagtatttt

SEQ ID NO: 722 - DNA, 39 bp, Human
tgtgccagcagcttagactggaatcagccccagcatttt

SEQ ID NO: 723 - DNA, 42 bp, Human
tgtgccagcagcttagaggactcctacaatgagcagttcttc

SEQ ID NO: 724 - DNA, 45 bp, Human
tgtgccagcagcttagaactaatcgttgaagagacccagtacttc

SEQ ID NO: 725 - DNA, 45 bp, Human
tgtgccagcagcttagaactaagcgttgaagagacccagtacttc

SEQ ID NO: 726 - DNA, 45 bp, Human
tgtgccagcagcttagaagtggcgttggactacgagcagtacttc

SEQ ID NO: 727 - DNA, 42 bp, Human
tgtgccagcagcttatttgcgggagcagatacgcagtatttt

SEQ ID NO: 728 - DNA, 45 bp, Human
tgtgccagcagcctcttccctagcgactacaatgagcagttcttc

SEQ ID NO: 729 - DNA, 39 bp, Human
tgtgccagcagcttgggggggggtgaaaaactgtttttt

SEQ ID NO: 730 - DNA, 36 bp, Human
tgtgccagcagcttaggggggaatgagcagttcttc

SEQ ID NO: 731 - DNA, 36 bp, Human
tgtgccagcagccttgggggcactgaagctttcttt

SEQ ID NO: 732 - DNA, 42 bp, Human
tgtgccagcagcttgggacagggggccaacgagcagtacttc

SEQ ID NO: 733 - DNA, 51 bp, Human
tgtgccagcagcttagggcgtgagacaggggaagtctatggctacaccttc

SEQ ID NO: 734 - DNA, 39 bp, Human
tgtgccagcagcttggggactagcgatgagcagttcttc

SEQ ID NO: 735 - DNA, 39 bp, Human
tgtgccagcagcttagggtacgtcagcgagcagtacttc

SEQ ID NO: 736 - DNA, 48 bp, Human
tgtgccagcagcttaattggggtttcggtctacaatgagcagttcttc

SEQ ID NO: 737 - DNA, 39 bp, Human
tgtgccagcagcttaaaagtactgggagaagctttcttt

SEQ ID NO: 738 - DNA, 45 bp, Human
tgtgccagcagcttactcgggggatacggaaacaccatatatttt

SEQ ID NO: 739 - DNA, 54 bp, Human
tgtgccagcagcttgatggagtcgggattggtggggagagatacgcagtatttt

SEQ ID NO: 740 - DNA, 39 bp, Human
tgtgccagcagcttaatgggcggacatgagcagttcttc

SEQ ID NO: 741 - DNA, 48 bp, Human
tgtgccagcagcttaatgggggggacaggcaatgaaaaactgtttttt

SEQ ID NO: 742 - DNA, 48 bp, Human
tgtgccagcagcttaaatccgggactagcggaagagacccagtacttc

SEQ ID NO: 743 - DNA, 54 bp, Human
tgtgccagcagcttaaaccccctcgcccgcgggacagacaatgagcagttcttc

SEQ ID NO: 744 - DNA, 51 bp, Human
tgtgccagcagcttaagaggttggactagcgacacagatacgcagtatttt

SEQ ID NO: 745 - DNA, 45 bp, Human
tgtgccagcagcttaagtgcggctggggccaacgtcctgactttc

SEQ ID NO: 746 - DNA, 45 bp, Human
tgtgccagcagcttatccgccgggagcccagatacgcagtatttt

SEQ ID NO: 747 - DNA, 45 bp, Human
tgtgccagcagcttaagtagcgggagcattgatgagcagttcttc

SEQ ID NO: 748 - DNA, 45 bp, Human
tgtgccagcagcctgacgggcgggagggcagatacgcagtatttt

SEQ ID NO: 749 - DNA, 45 bp, Human
tgtgccagcagcttaacagggacaggagtgtacgagcagtacttc

SEQ ID NO: 750 - DNA, 48 bp, Human
tgtgccagcagcttgactagcgggagctcctacaatgagcagttcttc

SEQ ID NO: 751 - DNA, 42 bp, Human
tgtgccagcagcttagtagacggaacctacgagcagtacttc

SEQ ID NO: 752 - DNA, 60 bp, Human
tgtgccagcagcttagttcctcctggactagcgggagtcgaaggatacgagcagtacttc

SEQ ID NO: 753 - DNA, 42 bp, Human
tgtgccagcagcttagttcaggcccaagagacccagtacttc

SEQ ID NO: 754 - DNA, 54 bp, Human
tgtgccagcagcttatgggagacagggaaatcgaccaccggggagctgtttttt

SEQ ID NO: 755 - DNA, 54 bp, Human
tgtgccagcagcttatactttggtggactagcgggacccggggagctgtttttt

SEQ ID NO: 756 - DNA, 48 bp, Human
tgtgccagcagcatgggactagcggagaccttatacgagcagtacttc

SEQ ID NO: 757 - DNA, 48 bp, Human
tgtgccagcagccccgacccccatagggggatccacgagcagtacttc

SEQ ID NO: 758 - DNA, 36 bp, Human
tgtgccagcagccccgactacaatgagcagttcttc

SEQ ID NO: 759 - DNA, 48 bp, Human
tgtgccagcagccccgggactagcgggagggtcaatgagcagttcttc

SEQ ID NO: 760 - DNA, 48 bp, Human
tgtgccagcagcccaattgggtctgagtctggaaacaccatatatttt

SEQ ID NO: 761 - DNA, 48 bp, Human
tgtgccagcagcccccgggcagggggcgatatcaatgagcagttcttc

SEQ ID NO: 762 - DNA, 42 bp, Human
tgtgccagcagccctcgggagaacaccggggagctgtttttt

SEQ ID NO: 763 - DNA, 36 bp, Human
tgtgccagcagcccacgggggaacgagcagtacttc

SEQ ID NO: 764 - DNA, 36 bp, Human
tgtgccagcagcccccggactagcgagtggttcttc

SEQ ID NO: 765 - DNA, 39 bp, Human
tgtgccagcagcccaaggactaccggggagctgtttttt

SEQ ID NO: 766 - DNA, 45 bp, Human
tgtgccagcagcccgacagggggcgcaggcggggagctgtttttt

SEQ ID NO: 767 - DNA, 48 bp, Human
tgtgccagcagcccctacccgggacaaaactacaatgagcagttcttc

SEQ ID NO: 768 - DNA, 45 bp, Human
tgtgccagcagcccgtataggtctaataacaatgagcagttcttc

SEQ ID NO: 769 - DNA, 45 bp, Human
tgtgccagcagccagggtccccctggggccaacgtcctgactttc

SEQ ID NO: 770 - DNA, 42 bp, Human
tgtgccagcagccgtgatctcccctcctacgagcagtacttc

SEQ ID NO: 771 - DNA, 39 bp, Human
tgtgccagcagccgtcccggcacagatacgcagtatttt

SEQ ID NO: 772 - DNA, 57 bp, Human
tgtgccagcagccggacctatacgtactccgggacagctaactatggctacaccttc

SEQ ID NO: 773 - DNA, 45 bp, Human
tgtgccagcagcagatgggacagcagctcctacgagcagtacttc

SEQ ID NO: 774 - DNA, 45 bp, Human
tgtgccagcagctccgaagcgggagcacaagagacccagtacttc

SEQ ID NO: 775 - DNA, 39 bp, Human
tgtgccagcagctccgagatgaacactgaagctttcttt

SEQ ID NO: 776 - DNA, 42 bp, Human
tgtgctagcagcagcgagatgaacaccggggagctgtttttt

SEQ ID NO: 777 - DNA, 54 bp, Human
tgtgccagcagctctggactagcgggaggtgcgagctcctacgagcagtacttc

SEQ ID NO: 778 - DNA, 39 bp, Human
tgtgccagcagctccgggtcctacaatgagcagttcttc

SEQ ID NO: 779 - DNA, 45 bp, Human
tgtgccagcagctcaattagactagccgacaatgagcagttcttc

SEQ ID NO: 780 - DNA, 39 bp, Human
tgtgccagcagctccctattatcctatggctacaccttc

SEQ ID NO: 781 - DNA, 42 bp, Human
tgtgccagcagctcaaactgggatcactatggctacaccttc

SEQ ID NO: 782 - DNA, 48 bp, Human
tgtgccagcagcagctccgggacagggtacaccggggagctgtttttt

SEQ ID NO: 783 - DNA, 45 bp, Human
tgtgccagcagctccactagcgggggctcctacgagcagtacttc

SEQ ID NO: 784 - DNA, 39 bp, Human
tgtgccagcagctcatacgacgcagatacgcagtatttt

SEQ ID NO: 785 - DNA, 45 bp, Human
tgtgccagcagtaccgggactagcgattacaatgagcagttcttc

SEQ ID NO: 786 - DNA, 48 bp, Human
tgtgccagcagctggggcggagcgggagggggctatgagcagttcttc

SEQ ID NO: 787 - DNA, 45 bp, Human
tgtgccagcagctggggactgaactctggaaacaccatatatttt

SEQ ID NO: 788 - DNA, 45 bp, Human
tgtgccagcagctaccctacagggtcctacaatgagcagttcttc

SEQ ID NO: 789 - DNA, 48 bp, Human
tgtgccagcaccgaacttacgggaccccgggcaaacgagcagttcttc

SEQ ID NO: 790 - DNA, 42 bp, Human
tgtgccagcaccttagcgggaggggtcaatgagcagttcttc

SEQ ID NO: 791 - DNA, 42 bp, Human
tgtgccagcagcgccgggacggctaactatggctacaccttc

SEQ ID NO: 792 - DNA, 39 bp, Human
tgtgccagcagcgcaggggtatcgcggggctacaccttc

SEQ ID NO: 793 - DNA, 51 bp, Human
tgtgccagcagcgcccaccagggactagatcttggagatacgcagtatttt

SEQ ID NO: 794 - DNA, 48 bp, Human
tgtgccagcagcgccctcaccgggaaccccacagatacgcagtatttt

SEQ ID NO: 795 - DNA, 45 bp, Human
tgtgccagcagcgcttccgggacagcgaacactgaagctttcttt

SEQ ID NO: 796 - DNA, 45 bp, Human
tgtgccagcagcgcctcacagggcgggggcactgaagctttcttt

SEQ ID NO: 797 - DNA, 45 bp, Human
tgtgccagcagcgccaccgggactggaggcactgaagctttcttt

SEQ ID NO: 798 - DNA, 45 bp, Human
tgtgccagcagcgcgactagcggcgacctctacgagcagtacttc

SEQ ID NO: 799 - DNA, 45 bp, Human
tgtgccagcagcgccactaccgggacaatttacgagcagtacttc

SEQ ID NO: 800 - DNA, 42 bp, Human
tgtgccagcagcgcatatggacagggcactgaagctttcttt

SEQ ID NO: 801 - DNA, 48 bp, Human
tgtgccagcagcgcctatcctgaagggacaggccaagaccagtacttc

SEQ ID NO: 802 - DNA, 48 bp, Human
tgtgccagcagcgacgggactagcggaagaggggatacgcagtatttt

SEQ ID NO: 803 - DNA, 45 bp, Human
tgtgccagcagcgagcacggggctggggccaacgtcctgactttc

SEQ ID NO: 804 - DNA, 45 bp, Human
tgtgccagcagcgaatccgggactaccacagatacgcagtatttt

SEQ ID NO: 805 - DNA, 45 bp, Human
tgtgccagcagcgaatggacagctagcacagatacgcagtatttt

SEQ ID NO: 806 - DNA, 45 bp, Human
tgtgccagcagcgagtacaggggagtgggggaaaaactgtttttt

SEQ ID NO: 807 - DNA, 51 bp, Human
  misc_feature (23)..(23): n is a, c, g, or t
  misc_feature (40)..(40): n is a, c, g, or t
  misc_feature (45)..(45): n is a, c, g, or t
tgtgccagcagcttcggactagngggacccccagcctacnagcantacttc

SEQ ID NO: 808 - DNA, 42 bp, Human
tgtgccagcagcggggattcaggggtaacagaactgtttttt

SEQ ID NO: 809 - DNA, 36 bp, Human
tgtgccagcagcggagactcctacgagcagtacttc

SEQ ID NO: 810 - DNA, 42 bp, Human
tgtgccagcagcggcgaagacagctcctacgagcagtacttc

SEQ ID NO: 811 - DNA, 45 bp, Human
tgtgccagcagcgggggggagcggggtacctacgagcagtacttc

SEQ ID NO: 812 - DNA, 51 bp, Human
tgtgccagcagcggacagggggttatctctggggccaacgtcctgactttc

SEQ ID NO: 813 - DNA, 42 bp, Human
tgtgccagcagcggttctagcgggggtgagacccagtacttc

SEQ ID NO: 814 - DNA, 45 bp, Human
tgtgccagcagcttagaaggggtatccacagatacgcagtatttt

SEQ ID NO: 815 - DNA, 45 bp, Human
tgtgccagcagcttaggagcgggacaggaatcacccctccacttt

SEQ ID NO: 816 - DNA, 42 bp, Human
tgtgccagcagcttaggggctagcacagatacgcagtatttt

SEQ ID NO: 817 - DNA, 45 bp, Human
tgtgccagcagcctcggggacggattcaatcagccccagcatttt

SEQ ID NO: 818 - DNA, 51 bp, Human
tgtgccagcagcttgggactagggggatccccagcctactaccagtacttc

SEQ ID NO: 819 - DNA, 45 bp, Human
tgtgccagcagcctcgggacaaacagcaatcagccccagcatttt

SEQ ID NO: 820 - DNA, 45 bp, Human
tgtgccagcagcctacaggggggctcctacaatgagcagttcttc

SEQ ID NO: 821 - DNA, 48 bp, Human
tgtgccagcagcctccggggtagcggggtcgccggggagctgtttttt

SEQ ID NO: 822 - DNA, 42 bp, Human
tgtgccagcagcccgggacagggctcctacgagcagtacttc

SEQ ID NO: 823 - DNA, 42 bp, Human
tgtgccagcagcccccattggtctgttcagccccagcatttt

SEQ ID NO: 824 - DNA, 48 bp, Human
tgtgccagcagcccccctgccggtccctcctacaatgagcagttcttc

SEQ ID NO: 825 - DNA, 45 bp, Human
tgtgccagcagcccacaagcgagttcctacaatgagcagttcttc

SEQ ID NO: 826 - DNA, 45 bp, Human
tgtgccagcagccccacggacagggcggatcagccccagcatttt

SEQ ID NO: 827 - DNA, 39 bp, Human
tgtgccagcagccgcggaatgaacactgaagctttcttt

SEQ ID NO: 828 - DNA, 45 bp, Human
tgtgccagcagtcgttggaccgctccccaagagacccagtacttc

SEQ ID NO: 829 - DNA, 48 bp, Human
tgtgccagcagttctaaagcgggaggctcctacaatgagcagttcttc

SEQ ID NO: 830 - DNA, 45 bp, Human
tgtgccagcagctcccgcgggagggggcaagagacccagtacttc

SEQ ID NO: 831 - DNA, 42 bp, Human
tgtgccagcagcagtagcgggggcggaaatgagcagttcttc

SEQ ID NO: 832 - DNA, 39 bp, Human
tgtgccagcagcgtagcagggtccggggagctgtttttt

SEQ ID NO: 833 - DNA, 42 bp, Human
tgtgccagcagcgtagcttacaggggcggtgaagctttcttt

SEQ ID NO: 834 - DNA, 39 bp, Human
tgtgccagcagcgtagatgaggggaccccctacaccttc

SEQ ID NO: 835 - DNA, 48 bp, Human
tgtgccagcagcgtagatggggggcattcctcctacgagcagtacttc

SEQ ID NO: 836 - DNA, 45 bp, Human
tgtgccagcagcgtagacgggaatagcaatcagccccagcatttt

SEQ ID NO: 837 - DNA, 45 bp, Human
tgtgccagcagcgtagaccttgtggggaacaatgagcagttcttc

SEQ ID NO: 838 - DNA, 45 bp, Human
tgtgccagcagcgtagacagcggggaatacaatgagcagttcttc

SEQ ID NO: 839 - DNA, 45 bp, Human
tgtgccagcagcgtagaggctagcggctacaatgagcagttcttc

SEQ ID NO: 840 - DNA, 45 bp, Human
tgtgccagcagcgtagagggcaggagcacagatacgcagtatttt

SEQ ID NO: 841 - DNA, 42 bp, Human
tgtgccagcagcgtagagtatagggggaatgagcagttcttc

SEQ ID NO: 842 - DNA, 42 bp, Human
tgtgccagcagcgtaggggcatttgacggtgagcagttcttc

SEQ ID NO: 843 - DNA, 45 bp, Human
tgtgccagcagcgtaggggcgggagccaaaaacattcagtacttc

SEQ ID NO: 844 - DNA, 45 bp, Human
tgtgccagcagcgtaggagcgggagggcccaatgagcagttcttc

SEQ ID NO: 845 - DNA, 36 bp, Human
tgtgccagcagcgttgggggagagacccagtacttc

SEQ ID NO: 846 - DNA, 45 bp, Human
tgtgccagcagcgtaggaggagggctggacaatgagcagttcttc

SEQ ID NO: 847 - DNA, 45 bp, Human
tgtgccagcagcgtagggggcaggggcacagatacgcagtatttt

SEQ ID NO: 848 - DNA, 45 bp, Human
tgtgccagcagcgtaggcgggagcgcctacaatgagcagttcttc

SEQ ID NO: 849 - DNA, 48 bp, Human
tgtgccagcagcgtagggcatgggtctggggccaacgtcctgactttc

SEQ ID NO: 850 - DNA, 45 bp, Human
tgtgccagcagcgtgggacacctcctgaccggggagctgtttttt

SEQ ID NO: 851 - DNA, 51 bp, Human
tgtgccagcagcgtcggactagcgggacccccagcctacgagcagtacttc

SEQ ID NO: 852 - DNA, 51 bp, Human
tgtgccagcagcgtcggactagcgggacccccagcctacgtgcagtacttc

SEQ ID NO: 853 - DNA, 51 bp, Human
tgtgccagcagcgtcggactaccgggacccccagcctacgagcagtacttc

SEQ ID NO: 854 - DNA, 45 bp, Human
tgtgccagcagcgtaggcaatagcgggaaagagacccagtacttc

SEQ ID NO: 855 - DNA, 45 bp, Human
tgtgccagcagcgtagggagcggtacgggatcacccctccacttt

SEQ ID NO: 856 - DNA, 45 bp, Human
tgtgccagcagcgtcgggacaggggggatgtgggagcagtacttc

SEQ ID NO: 857 - DNA, 48 bp, Human
tgtgccagcagcgtaggggtggagggggtcaattcacccctccacttt

SEQ ID NO: 858 - DNA, 51 bp, Human
tgtgccagcagcgtccctcgactagcgggaggtcacaatgagcagttcttc

SEQ ID NO: 859 - DNA, 42 bp, Human
tgtgccagcagcgtaccttatcggggaggtgagcagttcttc

SEQ ID NO: 860 - DNA, 42 bp, Human
tgtgccagcagcgtccagcgggagggcggtgagcagtacttc

SEQ ID NO: 861 - DNA, 42 bp, Human
tgtgccagcagcgtaaggtgggagggctacgagcagtacttc

SEQ ID NO: 862 - DNA, 42 bp, Human
tgtgccagcagcgtatcgggcgcctacaatgagcagttcttc

SEQ ID NO: 863 - DNA, 42 bp, Human
tgtgccagcagcgtatcgggagactacaatgagcagttcttc

SEQ ID NO: 864 - DNA, 42 bp, Human
tgtgccagcagcgtatccgggggcaatcagccccagcatttt

SEQ ID NO: 865 - DNA, 51 bp, Human
tgtgccagcagcgtatctgggactcaacccgacaccggggagctgtttttt

SEQ ID NO: 866 - DNA, 45 bp, Human
tgtgccagcagcgtcaccgggacaaccacagatacgcagtatttt

SEQ ID NO: 867 - DNA, 45 bp, Human
tgtgccagcagcgtaaccactggggggggaaacaccatatatttt

SEQ ID NO: 868 - DNA, 48 bp, Human
tgtgccagcagcgtagttcccagcgggatgtatggtgagcagttcttc

SEQ ID NO: 869 - DNA, 54 bp, Human
tgtgccagcagcgtagtgactagcgggaggaggtcctacaatgagcagttcttc

SEQ ID NO: 870 - DNA, 42 bp, Human
tgtgccagcagcgtctacgacggcacagatacgcagtatttt

SEQ ID NO: 871 - DNA, 54 bp, Human
tgtgccagcaccgccaatagcgaaggctcttacggggccaacgtcctgactttc

SEQ ID NO: 872 - DNA, 48 bp, Human
tgtgccatcagtgccgactattccagctcctacaatgagcagttcttc

SEQ ID NO: 873 - DNA, 42 bp, Human
tgtgccatcagtgagtcagggagctcctacgagcagtacttc

SEQ ID NO: 874 - DNA, 45 bp, Human
tgtgccatcagtgagtcgatagcgggggtcaatgagcagttcttc

SEQ ID NO: 875 - DNA, 54 bp, Human
tgtgccatcagtgagtcacctgggggggctcggaacacagatacgcagtatttt

SEQ ID NO: 876 - DNA, 48 bp, Human
tgtgccatcagtggggatgtcgagagctcctacaatgagcagttcttc

SEQ ID NO: 877 - DNA, 42 bp, Human
tgtgccatcagtggatcgcgacaggagaatgagcagttcttc

SEQ ID NO: 878 - DNA, 42 bp, Human
tgtgccatcagtagcctagcgggagaagatacgcagtatttt

SEQ ID NO: 879 - DNA, 42 bp, Human
tgcgccagcagtgggggactagcgggatacgagcagtacttc

SEQ ID NO: 880 - DNA, 39 bp, Human
tgtgccacaaaggacggggattcctacgagcagtacttc

SEQ ID NO: 881 - DNA, 42 bp, Human
tgtgccacccagggcgggggagtgaacactgaagctttcttt

SEQ ID NO: 882 - DNA, 45 bp, Human
tgtgccaccgtctctagcgagggcggccccggggagctgtttttt

SEQ ID NO: 883 - DNA, 39 bp, Human
tgtgccagcaacttatggcctggggaaaggcaatacttc

SEQ ID NO: 884 - DNA, 39 bp, Human
tgtgccagcagaattctgggatacaatgagcagttcttc

SEQ ID NO: 885 - DNA, 36 bp, Human
tgtgccagcagaccggggtacaatgagcagttcttc

SEQ ID NO: 886 - DNA, 36 bp, Human
tgtgccagcagctttgagcgcactgaagctttcttt

SEQ ID NO: 887 - DNA, 42 bp, Human
tgtgccagcagcttcggtggggtgtacaatgagcagttcttc

SEQ ID NO: 888 - DNA, 36 bp, Human
tgtgccagcagcttcgggcagtacgagcagtacttc

SEQ ID NO: 889 - DNA, 36 bp, Human
tgtgccagcagctttagaagcaatgagcagttcttc

SEQ ID NO: 890 - DNA, 48 bp, Human
tgtgccagcagcggcccccggacagggatcaccggggagctgtttttt

SEQ ID NO: 891 - DNA, 42 bp, Human
tgtgccagcagcgggacgggagctaactatggctacaccttc

SEQ ID NO: 892 - DNA, 39 bp, Human
tgtgccagcagcatagtcgggggaaacattcagtacttc

SEQ ID NO: 893 - DNA, 33 bp, Human
tgtgccagcagcaaggggaagacccagtacttc

SEQ ID NO: 894 - DNA, 51 bp, Human
tgtgccagcagcttagccccgggaagggagcatacgacacccctccacttt

SEQ ID NO: 895 - DNA, 42 bp, Human
tgtgccagcagcttagcgagggagaacactgaagctttcttt

SEQ ID NO: 896 - DNA, 45 bp, Human
tgtgccagcagcttagacccccaggggaacactgaagctttcttt

SEQ ID NO: 897 - DNA, 42 bp, Human
tgtgccagcagcttagactcgggcacagatacgcagtatttt

SEQ ID NO: 898 - DNA, 39 bp, Human
tgtgccagcagcttagattacatgcagccccagcatttt

SEQ ID NO: 899 - DNA, 45 bp, Human
tgtgccagcagcttagaggccgcggtatcctacgagcagtacttc

SEQ ID NO: 900 - DNA, 48 bp, Human
tgtgccagcagcttgggggcccgcgggaaccaagagacccagtacttc

SEQ ID NO: 901 - DNA, 45 bp, Human
tgtgccagcagcttagggggactagcgcgatacgagcagtacttc

SEQ ID NO: 902 - DNA, 42 bp, Human
tgtgccagcagcctcggactagctgcagatacgcagtatttt

SEQ ID NO: 903 - DNA, 39 bp, Human
tgtgccagcagccttttacagggtggtgaagctttcttt

SEQ ID NO: 904 - DNA, 45 bp, Human
tgtgccagcagcttacgggacaggaacaccggggagctgtttttt

SEQ ID NO: 905 - DNA, 57 bp, Human
tgtgccagcagcttagttgggacaccgactagcgggagaggcaatgagcagttcttc

SEQ ID NO: 906 - DNA, 51 bp, Human
tgtgccagcagcttagtcccagtccagggggctatcaatgagcagttcttc

SEQ ID NO: 907 - DNA, 39 bp, Human
tgtgccagcagcatgggggtttcctacgagcagtacttc

SEQ ID NO: 908 - DNA, 48 bp, Human
tgtgccagcagccccgggacagcctgggtccaagagacccagtacttc

SEQ ID NO: 909 - DNA, 45 bp, Human
tgtgccagcagccgaactagcgggagtttcgacgagcagtacttc

SEQ ID NO: 910 - DNA, 39 bp, Human
tgtgccagcagctccgcggacagtccggggcagtacttc

SEQ ID NO: 911 - DNA, 45 bp, Human
tgtgccagcagctccgggactagcgcgtacaatgagcagttcttc

SEQ ID NO: 912 - DNA, 51 bp, Human
tgtgccagcagctccccggtgggcccccgtaggtttggtgagcagttcttc

SEQ ID NO: 913 - DNA, 54 bp, Human
tgtgccagcagctccccctggctagcgggagttttccaagagacccagtacttc

SEQ ID NO: 914 - DNA, 45 bp, Human
tgtgccagcagcacagccgggactagagtgaatgagcagttcttc

SEQ ID NO: 915 - DNA, 57 bp, Human
tgtgccagcagcaccgtccggcacgcgcagacagcgaacaccggggagctgtttttt

SEQ ID NO: 916 - DNA, 39 bp, Human
tgtgccagcagcgttagccctaccggggagctgtttttt

SEQ ID NO: 917 - DNA, 42 bp, Human
tgtgccagcagctggaggggcggcacagatacgcagtatttt

SEQ ID NO: 918 - DNA, 42 bp, Human
tgtgccagcagctatgaggcctctcaagagacccagtacttc

SEQ ID NO: 919 - DNA, 39 bp, Human
tgtgccagcaccgttggccctaccggggagccgtttttt

SEQ ID NO: 920 - DNA, 48 bp, Human
tgtgctagtgctttgggggctagcgggcggaccggggagctgtttttt

SEQ ID NO: 921 - DNA, 39 bp, Human
tgtgccagcgacaggactatgagcactgaagctttcttt

SEQ ID NO: 922 - DNA, 39 bp, Human
tgtgccagcgacagtcccctgaacactgaagctttcttt

SEQ ID NO: 923 - DNA, 39 bp, Human
tgtgccagcgacagtactatgaacactgaagctttcttt

SEQ ID NO: 924 - DNA, 48 bp, Human
tgtgccagcgaaagttctagcgggagtgactacaatgagcagttcttc

SEQ ID NO: 925 - DNA, 42 bp, Human
tgtgccagcttccacggggtgctatacaatgagcagttcttc

SEQ ID NO: 926 - DNA, 36 bp, Human
tgtgccagcggagacagtttaagggagcagttcttc

SEQ ID NO: 927 - DNA, 42 bp, Human
tgtgctagtggtttggcaaccaatccctacgagcagtacttc

SEQ ID NO: 928 - DNA, 36 bp, Human
tgtgctagtggtttggtggctggggagctgtttttt

SEQ ID NO: 929 - DNA, 45 bp, Human
tgtgctagtggtttggttcagggaagttactacgagcagtacttc

SEQ ID NO: 930 - DNA, 36 bp, Human
tgtgccagcggccagggtagctatggctacaccttc

SEQ ID NO: 931 - DNA, 36 bp, Human
tgtgccagcggcagggaaaatggcgagcagtacttc

SEQ ID NO: 932 - DNA, 45 bp, Human
tgtgccagcaaatctttttttcaggctcaagagacccagtacttc

SEQ ID NO: 933 - DNA, 45 bp, Human
tgtgccagtcttttattccaggctccccccgtcgagcagtacttc

SEQ ID NO: 934 - DNA, 39 bp, Human
tgtgccagcaacgaagaaagggcagatacgcagtatttt

SEQ ID NO: 935 - DNA, 42 bp, Human
tgtgccagcaggggacagggggctttgcagccccagcatttt

SEQ ID NO: 936 - DNA, 39 bp, Human
tgtgccagcagggggacaggggataatgagcagttcttc

SEQ ID NO: 937 - DNA, 54 bp, Human
tgtgccagcagacccaagtttagcgaccccgggccaaacaatgagcagttcttc

SEQ ID NO: 938 - DNA, 48 bp, Human
tgtgccagcagatccctcgggacaccacgtctcaatgagcagttcttc

SEQ ID NO: 939 - DNA, 45 bp, Human
tgtgccagcagcgcccggacagtagccaaaaacattcagtacttc

SEQ ID NO: 940 - DNA, 39 bp, Human
tgtgccagcagtttcgcgggacccactgaagctttcttt

SEQ ID NO: 941 - DNA, 39 bp, Human
tgtgccagcagttttgggggaatcgatggctacaccttc

SEQ ID NO: 942 - DNA, 45 bp, Human
tgtgccagcagtttcttagcgggagccggcaatgagcagttcttc

SEQ ID NO: 943 - DNA, 48 bp, Human
tgtgccagcagttttctccctagcgccctttgggatgagcagttcttc

SEQ ID NO: 944 - DNA, 48 bp, Human
tgtgccagcagttttaggatcgagacagggaggtacggctacaccttc

SEQ ID NO: 945 - DNA, 54 bp, Human
tgtgccagcagtttttctcgaggcggtgttgggaggcgggagacccaggacttc

SEQ ID NO: 946 - DNA, 48 bp, Human
tgtgccagcagtttctcgacctgttcggctaactatggctacaccttc

SEQ ID NO: 947 - DNA, 39 bp, Human
tgtgccagcagcataacaggagcctatggctacaccttc

SEQ ID NO: 948 - DNA, 45 bp, Human
tgtgccagcagcaaggacaggggaagccaagagacccagtacttc

SEQ ID NO: 949 - DNA, 39 bp, Human
tgtgccagcagtttggcggcctacaatgagcagttcttc

SEQ ID NO: 950 - DNA, 45 bp, Human
tgtgccagcagtttagagggggcgccgggcactgaagctttcttt

SEQ ID NO: 951 - DNA, 45 bp, Human
tgtgccagcagtttagaactgacaggccccctcggctacaccttc

SEQ ID NO: 952 - DNA, 36 bp, Human
tgtgccagcagtttagaaaatcagccccagcatttt

SEQ ID NO: 953 - DNA, 45 bp, Human
tgtgccagcagtttattctgggctccccccgacaagcagtacttc

SEQ ID NO: 954 - DNA, 45 bp, Human
tgtgccagcagtttattctgggctccccccgtcgagcagtacttc

SEQ ID NO: 955 - DNA, 45 bp, Human
tgtgccagcagtttattctggggtccccccgtcaagcagtacttc

SEQ ID NO: 956 - DNA, 33 bp, Human
tgtgccagcagtttaggagagacccagtacttc

SEQ ID NO: 957 - DNA, 36 bp, Human
tgtgccagcagtttggggggcagtgaagctttcttt

SEQ ID NO: 958 - DNA, 51 bp, Human
tgtgccagcagtttagggtccgggacggccttgggcaatgagcagttcttc

SEQ ID NO: 959 - DNA, 42 bp, Human
tgtgccagcagtttaggcagcctgaacactgaagctttcttt

SEQ ID NO: 960 - DNA, 48 bp, Human
tgtgccagcagtttagggactagcgggagatggaatgaacagttcttc

SEQ ID NO: 961 - DNA, 48 bp, Human
tgtgccagcagtttaaatccctcaggggacctctatggctacaccttc

SEQ ID NO: 962 - DNA, 42 bp, Human
tgtgccagcagtttatccggggaattctacgagcagtacttc

SEQ ID NO: 963 - DNA, 39 bp, Human
tgtgccagcagtttatcaggaggtaacgagcagtacttc

SEQ ID NO: 964 - DNA, 45 bp, Human
tgtgccagcagtttaagtataagcgggggggtcgagcagttcttc

SEQ ID NO: 965 - DNA, 45 bp, Human
tgtgccagcagtttaaccgggatcgaccaagagacccagtacttc

SEQ ID NO: 966 - DNA, 45 bp, Human
tgtgccagcagtttgacctccggggttggggagacccagtacttc

SEQ ID NO: 967 - DNA, 42 bp, Human
tgtgccagcagtttaactagcggctacaatgagcagttcttc

SEQ ID NO: 968 - DNA, 45 bp, Human
tgtgccagcagtttagtggcggggggcgaaaatgagcagttcttc

SEQ ID NO: 969 - DNA, 42 bp, Human
tgtgccagcagtttagtgggagggacctacgagcagtacttc

SEQ ID NO: 970 - DNA, 42 bp, Human
tgtgccagcagtctgtatagcgggaggcatgagcagttcttc

SEQ ID NO: 971 - DNA, 33 bp, Human
tgtgccagcagtcccgccggggagctgtttttt

SEQ ID NO: 972 - DNA, 48 bp, Human
tgtgccagcagtcccattactagagctcctgacaatgagcagttcttc

SEQ ID NO: 973 - DNA, 45 bp, Human
tgtgccagcagccctcgggacagggttttttacgagcagtacttc

SEQ ID NO: 974 - DNA, 51 bp, Human
tgtgccagcagcccccggactagcggtagagggacagatacgcagtatttt

SEQ ID NO: 975 - DNA, 42 bp, Human
tgtgccagcagccctagcggggattacaatgagcagttcttc

SEQ ID NO: 976 - DNA, 39 bp, Human
tgtgccagcagtcccacaggggccggggagctgtttttt

SEQ ID NO: 977 - DNA, 39 bp, Human
tgtgccagcagccggacagggtcagatacgcagtatttt

SEQ ID NO: 978 - DNA, 42 bp, Human
tgtgccagcagttcgggcggcggctcctacgagcagtacttc

SEQ ID NO: 979 - DNA, 42 bp, Human
tgtgccagcagttcaggacagggcaatcagccccagcatttt

SEQ ID NO: 980 - DNA, 42 bp, Human
tgtgccagcagttctattgatggattctacgagcagtacttc

SEQ ID NO: 981 - DNA, 54 bp, Human
tgtgccagcagttccccgatctatcgaggacagcttaactatggctacaccttc

SEQ ID NO: 982 - DNA, 42 bp, Human
tgtgccagcagtaccgggaccccactctacgagcagtacttc

SEQ ID NO: 983 - DNA, 51 bp, Human
tgtgccagcagtacactagcgggaggttctcacaccggggagctgtttttt

SEQ ID NO: 984 - DNA, 39 bp, Human
tgtgccagcagtgtggcgtcctacaatgagcagttcttc

SEQ ID NO: 985 - DNA, 48 bp, Human
tgtgccagcagttgggacctaacaggggagggtagggtggctttcttt

SEQ ID NO: 986 - DNA, 51 bp, Human
tgtgccagcagttggactagcgggagctcgggctacaatgagcagttcttc

SEQ ID NO: 987 - DNA, 45 bp, Human
tgtgccagcacgtctagcgggagggatcgagatacgcagtatttt

SEQ ID NO: 988 - DNA, 45 bp, Human
tgtgccaccctttgtacccacggggttggggagacccagtacttc

SEQ ID NO: 989 - DNA, 57 bp, Human
tgtggcatgagttcgggggaatggaagcgggggggccggggggatacttcttatttt

SEQ ID NO: 990 - DNA, 48 bp, Human
tgtgccagcagacttacggggacctactataattcacccctccacttt

SEQ ID NO: 991 - DNA, 48 bp, Human
tgtgccagcagcttcgggggagagggctcctacaatgagcagttcttc

SEQ ID NO: 992 - DNA, 45 bp, Human
tgtgccagcagcttcagggctggtctactaggagagctgtttttt

SEQ ID NO: 993 - DNA, 51 bp, Human
tgtgccagcagctttagcgggagtcagtttataagaaagacccagtacttc

SEQ ID NO: 994 - DNA, 48 bp, Human
tgtgccagcagccacggactagcggggctcaccggggagctgtttttt

SEQ ID NO: 995 - DNA, 42 bp, Human
tgtgccagcagcatccaaagggaccaggagacccagtacttc

SEQ ID NO: 996 - DNA, 42 bp, Human
tgtgccagcagcttagctgctagcgggccggcgcagttcttc

SEQ ID NO: 997 - DNA, 45 bp, Human
tgtgccagcagcttagcgcgcgggagaatccacgagcagtacttc

SEQ ID NO: 998 - DNA, 39 bp, Human
tgtgccagcagcttagaagggttggacgagcagtacttc

SEQ ID NO: 999 - DNA, 36 bp, Human
tgtgccagcagcttagggggtgatgagcagttcttc

SEQ ID NO: 1000 - DNA, 54 bp, Human
tgtgccagcagcttaggccggactagcgggccccctagggatgagcagttcttc

SEQ ID NO: 1001 - DNA, 48 bp, Human
tgtgccagcagcttaggggttggtgtcgatggggagacccagtacttc

SEQ ID NO: 1002 - DNA, 45 bp, Human
tgtgccagcagcttaggttacgggtcaacctacgagcagtacttc

SEQ ID NO: 1003 - DNA, 33 bp, Human
tgtgccagcagcctccggggggagcagtacttc

SEQ ID NO: 1004 - DNA, 33 bp, Human
tgtgccagcagcttagtgctgactcctttcttt

SEQ ID NO: 1005 - DNA, 42 bp, Human
tgtgccagcagcttagtgacaccgggaaacaccatatatttt

SEQ ID NO: 1006 - DNA, 42 bp, Human
tgtgccagcagcttatggcggaactcctacgagcagtacttc

SEQ ID NO: 1007 - DNA, 45 bp, Human
tgtgccagcagcaacccgggacagggggactcacccctccacttt

SEQ ID NO: 1008 - DNA, 42 bp, Human
tgtgccagcagcccacgggacagtcaagagacccagtacttc

SEQ ID NO: 1009 - DNA, 36 bp, Human
tgtgccagcagccagtggaccggggagctgtttttt

SEQ ID NO: 1010 - DNA, 36 bp, Human
tgtgccagcagccgaggattcgacaccatatatttt

SEQ ID NO: 1011 - DNA, 54 bp, Human
tgtgccagcagctctgataaccccttagcgggagaaacagatacgcagtatttt

SEQ ID NO: 1012 - DNA, 51 bp, Human
tgtgccagcagctcagaccggactagtcatcgcacagatacgcagtatttt

SEQ ID NO: 1013 - DNA, 39 bp, Human
tgtgccagcagctccggcgagggtcagccccagcatttt

SEQ ID NO: 1014 - DNA, 45 bp, Human
tgtgccagcagctcccctttcgagggaagggatacgcagtatttt

SEQ ID NO: 1015 - DNA, 45 bp, Human
tgtgccagcagctcccgggacaggggaacctacgagcagtacttc

SEQ ID NO: 1016 - DNA, 45 bp, Human
tgtgccagcagctccaggggggcccgcacagatacgcagtatttt

SEQ ID NO: 1017 - DNA, 39 bp, Human
tgtgcccccagccactccccagggggaacgcactatttt

SEQ ID NO: 1018 - DNA, 42 bp, Human
tgtgccagcagggaaccagggacaggcaaagagcagtacttc

SEQ ID NO: 1019 - DNA, 42 bp, Human
tgtgccagcaggatttcagggggactaaatgagcagttcttc

SEQ ID NO: 1020 - DNA, 54 bp, Human
tgtgccagcagccacgaccgggactacctttctgggacagatacgcagtatttt

SEQ ID NO: 1021 - DNA, 45 bp, Human
tgtgccagcagcttactagcgggctcctacaatgagcagttcttc

SEQ ID NO: 1022 - DNA, 51 bp, Human
tgtgccagcagccaagatccctttcgtggtggctcctacgagcagtacttc

SEQ ID NO: 1023 - DNA, 36 bp, Human
tgtgccagcagccaagatagggtagcgcagttcttc

SEQ ID NO: 1024 - DNA, 51 bp, Human
tgtgccagcagccaagattacacgactagcagacacaatgagcagttcttc

SEQ ID NO: 1025 - DNA, 57 bp, Human
tgtgccagcagccaagaaggggagcggacccgaaggggcaccggggagctgtttttt

SEQ ID NO: 1026 - DNA, 54 bp, Human
tgtgccagcagccaagagaccctagcgggttggtaccaagagacccagtacttc

SEQ ID NO: 1027 - DNA, 42 bp, Human
tgtgccagcagccaagaatgggggcaagagacccagtacttc

SEQ ID NO: 1028 - DNA, 39 bp, Human
tgtgccagcagccaaggggctcgcactgaagctttcttt

SEQ ID NO: 1029 - DNA, 57 bp, Human
tgtgccagcagccaaggtgccagcgggagggccaagggcacagatacgcagtatttt

SEQ ID NO: 1030 - DNA, 51 bp, Human
tgtgccagcagccagggcctagcgggagttacctcctacgagcagtacttc

SEQ ID NO: 1031 - DNA, 39 bp, Human
tgtgccagcagccaaggccggggtaaagagcagtacttc

SEQ ID NO: 1032 - DNA, 54 bp, Human
tgtgccagcagccaaccaactcgacagggaccgaacaccggggagctgtttttt

SEQ ID NO: 1033 - DNA, 39 bp, Human
tgtgccagcagccagtccccagggggaacgcagtatttt

SEQ ID NO: 1034 - DNA, 42 bp, Human
tgtgccagctcgactagcggccaccaagagacccagtacttc

SEQ ID NO: 1035 - DNA, 36 bp, Human
tgtgccatacaggggacctcagagacccagtacttc

SEQ ID NO: 1036 - DNA, 42 bp, Human
tgtgccaccggacctgagcgcgtagtcgatgagcagttcttc

SEQ ID NO: 1037 - DNA, 51 bp, Human
tgtgccacccgaaagcctaacgaaccgagctcctacaatgagcagttcttc

SEQ ID NO: 1038 - DNA, 42 bp, Human
tgtgccaccagattaaaaggcggctacaatgagcagttcttc

SEQ ID NO: 1039 - DNA, 39 bp, Human
tgtgccaccagcgctcatggaggagagacccagtacttc

SEQ ID NO: 1040 - DNA, 51 bp, Human
tgtgccaccagcgacgagggacagggggcgcgcaccggggagctgtttttt

SEQ ID NO: 1041 - DNA, 39 bp, Human
tgtgccaccagcggactagcgggagaggagcagttcttc

SEQ ID NO: 1042 - DNA, 48 bp, Human
tgtgccaccagcatagcaggtaccatgaacaccggggagcagtttttt

SEQ ID NO: 1043 - DNA, 39 bp, Human
tgtgccaccagcatagtcgcgggcgagaacaatttcttc

SEQ ID NO: 1044 - DNA, 48 bp, Human
tgtgccaccagcaaagattacacaggctcctacaatgagcagttcttc

SEQ ID NO: 1045 - DNA, 42 bp, Human
tgtgccaccagtctaactagcgggtacaatgagcagttcttc

SEQ ID NO: 1046 - DNA, 39 bp, Human
tgtgccaccagcaaccatggcggagagacccagtacttc

SEQ ID NO: 1047 - DNA, 42 bp, Human
tgtgccaccagccccggcgggagtctgagcgagcagtacttc

SEQ ID NO: 1048 - DNA, 45 bp, Human
tgtgccaccagccctcgggacaccgtacaagagacccaatacttc

SEQ ID NO: 1049 - DNA, 39 bp, Human
tgtgccaccagcagggcggccgggtacgagcagtacttc

SEQ ID NO: 1050 - DNA, 42 bp, Human
tgtgccaccagcagagcaggggccaatcagccccagcatttt

SEQ ID NO: 1051 - DNA, 45 bp, Human
tgtgccaccagcagagcaaggacaggccttaatgagcagttcttc

SEQ ID NO: 1052 - DNA, 42 bp, Human
tgtgccaccagcagagatgccggacagtacgagcagtacttc

SEQ ID NO: 1053 - DNA, 48 bp, Human
tgtgccaccagcagagatgggactagcgggaggtacgagcagtacttc

SEQ ID NO: 1054 - DNA, 48 bp, Human
tgtgccaccagcagagatcacgcagcttcttcttggccccagcatttt

SEQ ID NO: 1055 - DNA, 48 bp, Human
tgtgccaccagcagagatcctagcgggagggcagatacgcagtatttt

SEQ ID NO: 1056 - DNA, 48 bp, Human
tgtgccaccagcagagatcccagcaggcgaattgagacccagtacttc

SEQ ID NO: 1057 - DNA, 42 bp, Human
tgtgccaccagcagggacaggggcgacaatgagcagttcttc

SEQ ID NO: 1058 - DNA, 48 bp, Human
tgtgccaccagcagggaacagggctctggggccaacgtcctgactttc

SEQ ID NO: 1059 - DNA, 51 bp, Human
tgtgccaccagcagagaaaccgggacagggggatcagatacgcagtatttt

SEQ ID NO: 1060 - DNA, 48 bp, Human
tgtgccaccagcagagaggtgggggtaggaagcactgaagctttcttt

SEQ ID NO: 1061 - DNA, 51 bp, Human
tgtgccaccagcagaggagagctactagcgggagcatccgagcagtacttc

SEQ ID NO: 1062 - DNA, 45 bp, Human
tgtgccaccagcagagggaaagggggggaagagacccagtacttc

SEQ ID NO: 1063 - DNA, 42 bp, Human
tgtgccaccagcaggggacagggggcgagagagcagtacttc

SEQ ID NO: 1064 - DNA, 48 bp, Human
tgtgccaccagcaggggacagcttagctcctacaatgagcagttcttc

SEQ ID NO: 1065 - DNA, 45 bp, Human
tgtgccaccagcagagggaggggagagagtcagccccagcatttt

SEQ ID NO: 1066 - DNA, 51 bp, Human
tgtgccaccagcagaggtacagggaggagagggacagatacgcagtatttt

SEQ ID NO: 1067 - DNA, 42 bp, Human
tgtgccaccagcagagggactagcgccaatgagcagttcttc

SEQ ID NO: 1068 - DNA, 48 bp, Human
tgtgccaccagcagacgtctagcggattcctcctacgagcagtacttc

SEQ ID NO: 1069 - DNA, 42 bp, Human
tgtgccaccagtagaaggacagctccctacgagcagtacttc

SEQ ID NO: 1070 - DNA, 45 bp, Human
tgtgccaccagcagatcatcgggacagtggtacgagcagtacttc

SEQ ID NO: 1071 - DNA, 39 bp, Human
tgtgccaccagcagagtttccggagatgaagctttcttt

SEQ ID NO: 1072 - DNA, 39 bp, Human
tgtgccaccagtcggtgggggggtgagacccagtacttc

SEQ ID NO: 1073 - DNA, 45 bp, Human
tgtgccaccagccgataccgggagagcaattcacccctccacttt

SEQ ID NO: 1074 - DNA, 45 bp, Human
tgtgccaccagcagcgcagcaactagcacagatacgcagtatttt

SEQ ID NO: 1075 - DNA, 42 bp, Human
tgtgccaccagcagcttcggcacacagtacgagcagtacttc

SEQ ID NO: 1076 - DNA, 39 bp, Human
tgtgccaccagcagccacgggggagagacccagtacttc

SEQ ID NO: 1077 - DNA, 39 bp, Human
tgtgccacgtcatccacggcaggggagacccagtacttc

SEQ ID NO: 1078 - DNA, 39 bp, Human
tgtgccaccagcaccgtcgcgggcgagacccagtacttc

SEQ ID NO: 1079 - DNA, 42 bp, Human
tgtgccagctcacccgaggtgagccaagagacccagtacttc

SEQ ID NO: 1080 - DNA, 42 bp, Human
tgtgccagctccccgggggcagggaacactgaagctttcttt

SEQ ID NO: 1081 - DNA, 51 bp, Human
tgtgccagctcacccgggcagtcaggagagtttggaaacaccatatatttt

SEQ ID NO: 1082 - DNA, 39 bp, Human
tgtgccagctcaccagggtcgggtcagccccagcatttt

SEQ ID NO: 1083 - DNA, 48 bp, Human
tgtgccagctcacctcccgacaggagaactggaaacaccatatatttt

SEQ ID NO: 1084 - DNA, 48 bp, Human
tgtgccagctcaccaccggtggcggcattagaatcacccctccacttt

SEQ ID NO: 1085 - DNA, 42 bp, Human
tgtgccagctcaccacgggacggggccaatgagcagttcttc

SEQ ID NO: 1086 - DNA, 51 bp, Human
tgtgccagctcaccggtacagggggcctctggggccaacgtcctgactttc

SEQ ID NO: 1087 - DNA, 45 bp, Human
tgtgccagctcacaaggacagggctccaccggggagctgtttttt

SEQ ID NO: 1088 - DNA, 48 bp, Human
tgtgccagctcgcgtaccgggcccgaatctccctacgagcagtacttc

SEQ ID NO: 1089 - DNA, 42 bp, Human
tgtgccagctcccggactacgaacaccggggagctgtttttt

SEQ ID NO: 1090 - DNA, 48 bp, Human
tgtgccagtgctgggggtcggctagcggtgagagatacgcagtatttt

SEQ ID NO: 1091 - DNA, 36 bp, Human
tgtgccagcgaagaccaagtagatacgcagtatttt

SEQ ID NO: 1092 - DNA, 42 bp, Human
tgtgccagcggacagaaaacctctggaaacaccatatatttt

SEQ ID NO: 1093 - DNA, 30 bp, Human
tgtgccagtgggtcgggtggctacaccttc

SEQ ID NO: 1094 - DNA, 36 bp, Human
tgtgccagtgggacaggaccctacgagcagtacttc

SEQ ID NO: 1095 - DNA, 39 bp, Human
tgtgccagtcatggcagggtagggactgaagctttcttt

SEQ ID NO: 1096 - DNA, 45 bp, Human
tgtgccagtatacagggggctgggagcaatcagccccagcatttt

SEQ ID NO: 1097 - DNA, 39 bp, Human
tgtgccagtctagcgggagggcttaatgagcagttcttc

SEQ ID NO: 1098 - DNA, 48 bp, Human
tgtgccagtatgattccttcgacagggggccgggctgaagctttcttt

SEQ ID NO: 1099 - DNA, 45 bp, Human
tgtgcctcccagggactagcaggctcctacaatgagcagttcttc

SEQ ID NO: 1100 - DNA, 36 bp, Human
tgtgccagccggggagactcctacgagcagtacttc

SEQ ID NO: 1101 - DNA, 39 bp, Human
tgtgccagtagacactggctaaccggggagctgtttttt

SEQ ID NO: 1102 - DNA, 39 bp, Human
tgtgccagtcgctcagggcccaccggggagctgtttttt

SEQ ID NO: 1103 - DNA, 45 bp, Human
tgtgccagtaggtctagcggggggaacctctacgagcagtacttc

SEQ ID NO: 1104 - DNA, 42 bp, Human
tgtgccagccgggtagcagcatacaatcagccccagcatttt

SEQ ID NO: 1105 - DNA, 45 bp, Human
tgtgccagtcgagtagcgggagggccctacaatgagcagttcttc

SEQ ID NO: 1106 - DNA, 39 bp, Human
tgtgccagtagcgccgggacggcgtatggctacaccttc

SEQ ID NO: 1107 - DNA, 42 bp, Human
tgtgccagtagtgccctactagcccctggggagctgtttttt

SEQ ID NO: 1108 - DNA, 51 bp, Human
tgtgccagtagtgcgactagcgggagtgggaactacaatgagcagttcttc

SEQ ID NO: 1109 - DNA, 51 bp, Human
tgtgccagtagcttcactagcgggagtatatgggccggggagctgtttttt

SEQ ID NO: 1110 - DNA, 51 bp, Human
tgtgccagtagcggactagcgggatcctcccgggcagatacgcagtatttt

SEQ ID NO: 1111 - DNA, 51 bp, Human
tgtgccagtagcggactatcgggatcctcccgggcagatacgcattatttt

SEQ ID NO: 1112 - DNA, 48 bp, Human
tgtgccagtagtggaagacagggaaagaacaccggggagctgtttttt

SEQ ID NO: 1113 - DNA, 36 bp, Human
tgtgccagtagtatagcggaccgagaagctttcttt

SEQ ID NO: 1114 - DNA, 39 bp, Human
tgtgccagtagtatagcgggttacaatgagcagttcttc

SEQ ID NO: 1115 - DNA, 42 bp, Human
tgtgccagtagtatagctgtgggactaaatgagcagttcttc

SEQ ID NO: 1116 - DNA, 48 bp, Human
tgtgccagtagtatagatggcggagcgggcgtctacgagcagtacttc

SEQ ID NO: 1117 - DNA, 39 bp, Human
tgtgccagtagtatcgacaaacccaatgagcagttcttc

SEQ ID NO: 1118 - DNA, 45 bp, Human
tgtgccagtagtatagactcggacctcaatcagccccagcatttt

SEQ ID NO: 1119 - DNA, 51 bp, Human
tgtgccagtagtatagacactagcgggggctcctacaatgagcagttcttc

SEQ ID NO: 1120 - DNA, 48 bp, Human
tgtgccagtagtatagattggacagggtatttggagacccagtacttc

SEQ ID NO: 1121 - DNA, 42 bp, Human
tgtgccagtagtatcttctttggctcctacgagcagtacttc

SEQ ID NO: 1122 - DNA, 33 bp, Human
tgtgccagtagtatcttcggcgagcagcacttc

SEQ ID NO: 1123 - DNA, 48 bp, Human
tgtgccagtagtatttttgggacaagttacaccggggagctgtttttt

SEQ ID NO: 1124 - DNA, 45 bp, Human
tgtgccagtagtataggtgctagcgggtctttggagcagttcttc

SEQ ID NO: 1125 - DNA, 48 bp, Human
tgtgccagtagtatagggggactagcgggagcagatacgcagtatttt

SEQ ID NO: 1126 - DNA, 48 bp, Human
tgtgccagtagtatagggggcacctacggcaatcagccccagcatttt

SEQ ID NO: 1127 - DNA, 54 bp, Human
tgtgccagtagtatagggcacacaggcggactagccaaaaacattcagtacttc

SEQ ID NO: 1128 - DNA, 45 bp, Human
tgtgccagtagtattgggcaggtctcctacaatgagcagttcttc

SEQ ID NO: 1129 - DNA, 48 bp, Human
tgtgccagtagtatagggtcggggggctatttttatggctacaccttc

SEQ ID NO: 1130 - DNA, 42 bp, Human
tgtgccagtagtatcgggacagggtcctacgagcagtacttc

SEQ ID NO: 1131 - DNA, 33 bp, Human
tgtgccagtagtatcggctatggctacaccttc

SEQ ID NO: 1132 - DNA, 51 bp, Human
tgtgccagtagtattatttcgggccgggacgcttacaatgagcagttcttc

SEQ ID NO: 1133 - DNA, 51 bp, Human
tgtgccagtagtattaaacagggggccgggatgaacactgaagctttcttt

SEQ ID NO: 1134 - DNA, 36 bp, Human
tgtgccagtagtatccttttcaatgagcagttcttc

SEQ ID NO: 1135 - DNA, 45 bp, Human
tgtgccagtagtatcttactagcggcgtacaatgagcagttcttc

SEQ ID NO: 1136 - DNA, 42 bp, Human
tgtgccagtagtatcttgttgggtcacaatgagcagttcttc

SEQ ID NO: 1137 - DNA, 39 bp, Human
tgtgccagtagtattaatagcaatcagccccagcatttt

SEQ ID NO: 1138 - DNA, 42 bp, Human
tgtgccagtagtataagggacagccaagagacccagtacttc

SEQ ID NO: 1139 - DNA, 48 bp, Human
tgtgccagtagtatctccgggacagggtctaatcagccccagcatttt

SEQ ID NO: 1140 - DNA, 45 bp, Human
tgtgccagtagtatatccagggacagggcgcgagagcagtacttc

SEQ ID NO: 1141 - DNA, 45 bp, Human
tgtgccagtagtataaccagcggggaaccttacgagcagtacttc

SEQ ID NO: 1142 - DNA, 39 bp, Human
tgtgccagtagtatagttctcaatcagccccagcatttt

SEQ ID NO: 1143 - DNA, 45 bp, Human
tgtgccagtagtatcgtcgtagacagttactacgagcagtacttc

SEQ ID NO: 1144 - DNA, 45 bp, Human
tgtgccagtagtatttggggggggggtacccacccccaggttttt

SEQ ID NO: 1145 - DNA, 39 bp, Human
tgtgccagtagtatctggccggccgacgagcagtacttc

SEQ ID NO: 1146 - DNA, 39 bp, Human
tgtgccagtagtctagcgtccggcggggagctgtttttt

SEQ ID NO: 1147 - DNA, 42 bp, Human
tgtgccagtagtctcctcgggggatcctacgagcagtacttc

SEQ ID NO: 1148 - DNA, 42 bp, Human
tgtgccagtagtctacgatccagggagtacgagcagtacttc

SEQ ID NO: 1149 - DNA, 39 bp, Human
tgtgccagtagtatggacccaggccagccccagcatttt

SEQ ID NO: 1150 - DNA, 39 bp, Human
tgtgccagtagtatggggatgggggagccccagcatttt

SEQ ID NO: 1151 - DNA, 42 bp, Human
tgtgccagtagtatgcttccagggacagatacgcagtatttt

SEQ ID NO: 1152 - DNA, 51 bp, Human
tgtgccagtagtatgactagcgggggaagctcctacaatgagcagttcttc

SEQ ID NO: 1153 - DNA, 54 bp, Human
tgtgccagtagtatggtacgtctccgggggactttgaacaatgagcagttcttc

SEQ ID NO: 1154 - DNA, 33 bp, Human
tgtgccagtagtatgtacaatgagcagttcttc

SEQ ID NO: 1155 - DNA, 48 bp, Human
tgtgccagtagtaatgctctagcgggaccttacaatgagcagttcttc

SEQ ID NO: 1156 - DNA, 42 bp, Human
tgtgccagtagtaacggggcgatatggaatgagcagttcttc

SEQ ID NO: 1157 - DNA, 48 bp, Human
tgtgccagtagtccggcaccgggacaggggaaagatggctacaccttc

SEQ ID NO: 1158 - DNA, 42 bp, Human
tgtgccagtagtccaggactcaaaacgggtgagcagttcttc

SEQ ID NO: 1159 - DNA, 48 bp, Human
tgtgccagtagccctatagggacaggggaagttcagccccagcatttt

SEQ ID NO: 1160 - DNA, 45 bp, Human
tgtgccagtagccccccggggggaggccaggatacgcagtatttt

SEQ ID NO: 1161 - DNA, 48 bp, Human
tgtgccagtagtcccacggacacaagctcctacaatgagcagttcttc

SEQ ID NO: 1162 - DNA, 45 bp, Human
tgtgccagtagtccctatcgacagggggaggacattcagtacttc

SEQ ID NO: 1163 - DNA, 45 bp, Human
tgtgccagtagccaggggtttaccagcaatcagccccagcatttt

SEQ ID NO: 1164 - DNA, 42 bp, Human
tgtgccagcagtcagcagggcggtaattcacccctccacttt

SEQ ID NO: 1165 - DNA, 42 bp, Human
tgtgccagtagtcagacagcaactaatgaaaaactgtttttt

SEQ ID NO: 1166 - DNA, 39 bp, Human
tgtgccagtagtcaaacgggggcggatacgcagtatttt

SEQ ID NO: 1167 - DNA, 39 bp, Human
tgtgccagtagccagacagggggctacgagcagtacttc

SEQ ID NO: 1168 - DNA, 45 bp, Human
tgtgccagtagccgggacccctcggggatagatacgcagtatttt

SEQ ID NO: 1169 - DNA, 39 bp, Human
tgtgccagtagtcgcggtttcagcaacgagcagtacttc

SEQ ID NO: 1170 - DNA, 45 bp, Human
tgtgccagtagtcgactagcgattggcacagatacgcagtatttt

SEQ ID NO: 1171 - DNA, 48 bp, Human
tgtgccagtagttccgccgaggagggcgtgggggaaaaactgtttttt

SEQ ID NO: 1172 - DNA, 45 bp, Human
tgtgccagtagttcggcaggggggtggagcactgaagctttcttt

SEQ ID NO: 1173 - DNA, 66 bp, Human
tgtgccagtagttccgaggtgtggggggacagggggctagcgggcccctacaatgagcagttcttc

SEQ ID NO: 1174 - DNA, 45 bp, Human
tgtgccagtagttcccgacaggtgagctacaatgagcagttcttc

SEQ ID NO: 1175 - DNA, 48 bp, Human
tgtgccagtagttcctcgtgggacagggtatacaatgagcagttcttc

SEQ ID NO: 1176 - DNA, 33 bp, Human
tgtgccagtagtacggccggggagctgtttttt

SEQ ID NO: 1177 - DNA, 39 bp, Human
tgtgccagtagtacagcggttgcctacgagcagtacttc

SEQ ID NO: 1178 - DNA, 51 bp, Human
tgtgccagtagtacgggactagcgggagtccgcgccggggagctgtttttt

SEQ ID NO: 1179 - DNA, 57 bp, Human
tgtgccagtagtacccatgaaggactagcgggagggcaaggggatgagcagttcttc

SEQ ID NO: 1180 - DNA, 48 bp, Human
tgtgccagtagtacaaacgccgatgacctcaccggggagctgtttttt

SEQ ID NO: 1181 - DNA, 42 bp, Human
tgtgccagtagtgtgggacaggggcggactgaagctttcttt

SEQ ID NO: 1182 - DNA, 45 bp, Human
tgtgccagtagtgtccgggacggaggtacctacgagcagtacttc

SEQ ID NO: 1183 - DNA, 42 bp, Human
tgtgccagtacaaacgggattaacaccggggagctgtttttt

SEQ ID NO: 1184 - DNA, 51 bp, Human
tgtgccagtactccgggagaggggactagtcgtaccggggagctgtttttt

SEQ ID NO: 1185 - DNA, 33 bp, Human
tgtgccagtgttcagggaggcgagcagtgcttc

SEQ ID NO: 1186 - DNA, 33 bp, Human
tgtgccagtgttcagggaggcgagcagtacttc

SEQ ID NO: 1187 - DNA, 48 bp, Human
tgtgccagttacggcccctggagagcgagctacaatgagcagttcttc

SEQ ID NO: 1188 - DNA, 30 bp, Human
tgtgccactaaggccggggagctgtttttt

SEQ ID NO: 1189 - DNA, 42 bp, Human
tgtgccagcagcaaatcccgagagaattcacccctccacttt

SEQ ID NO: 1190 - DNA, 54 bp, Human
tgcagtgctgcccgggacaaactgcccctactctggggttacgagcagtacttc

SEQ ID NO: 1191 - DNA, 45 bp, Human
tgcagtgctgacgcagggggcgcgaacaccggggagctgtttttt

SEQ ID NO: 1192 - DNA, 39 bp, Human
tgcagtgcggataagactagttacaatgagcagttcttc

SEQ ID NO: 1193 - DNA, 33 bp, Human
tgcagtgccgacagggaacctgaagctttcttt

SEQ ID NO: 1194 - DNA, 45 bp, Human
tgcagtgctgacacagggggcgcgaacaccggggagctgtttttt

SEQ ID NO: 1195 - DNA, 45 bp, Human
tgcagtgcagacactagcgtcccctcctacaatgagcagttcttc

SEQ ID NO: 1196 - DNA, 39 bp, Human
tgcagtgctgagaccgggacatctatcgagcagtacttc

SEQ ID NO: 1197 - DNA, 45 bp, Human
tgcagtgcttttcccccgggaggcccaagtgatacgcagtatttt

SEQ ID NO: 1198 - DNA, 42 bp, Human
tgcagtgctggagcgggggcgggccaagagacccagtacttc

SEQ ID NO: 1199 - DNA, 51 bp, Human
tgcagtgctggggggtgggacagggggctaaaagggactgaagctttcttt

SEQ ID NO: 1200 - DNA, 54 bp, Human
tgcagtgctgggattatagtacgactagcagcaagcacagatacgcagtatttt

SEQ ID NO: 1201 - DNA, 39 bp, Human
tgcagtgcaggacaggggggtaaagagacccagtacttc

SEQ ID NO: 1202 - DNA, 45 bp, Human
tgcagtgctcacgcggcagggggagagggtcagccccagcatttt

SEQ ID NO: 1203 - DNA, 48 bp, Human
tgcagtgctattgctagcgggagggccggcccagatacgcagtatttt

SEQ ID NO: 1204 - DNA, 42 bp, Human
tgcagtgctatcgagggctcaggatggaacgagcagtacttc

SEQ ID NO: 1205 - DNA, 42 bp, Human
tgcagtgcgatacgggcagggggccacgagacccagtacttc

SEQ ID NO: 1206 - DNA, 45 bp, Human
tgcagtgctatccggactagcggggtgggagatacgcagtatttt

SEQ ID NO: 1207 - DNA, 51 bp, Human
tgcagtgctattactccgggacaccgctctggggccaacgtcctgactttc

SEQ ID NO: 1208 - DNA, 42 bp, Human
tgcagtgccctgggggacaggacgggatacgagcagtacttc

SEQ ID NO: 1209 - DNA, 45 bp, Human
tgcagtgccctgggggaactagcgggagttggcgagcagttcttc

SEQ ID NO: 1210 - DNA, 42 bp, Human
tgcagtgctctttccgggacgcctcacaatgagcagttcttc

SEQ ID NO: 1211 - DNA, 30 bp, Human
tgcagtgccctcgttgggatccacaccttc

SEQ ID NO: 1212 - DNA, 36 bp, Human
tgcagtgctaatcctcagggctatggctacaccttc

SEQ ID NO: 1213 - DNA, 45 bp, Human
tgcagtgccaattcgggactagcgggaacaaatgagcagttcttc

SEQ ID NO: 1214 - DNA, 42 bp, Human
tgcagtgctaactctatgagcgggagtgagacccagtacttc

SEQ ID NO: 1215 - DNA, 57 bp, Human
tgcagtgctccagcctcactagcgtcccaacggggctcctacaatgagcagttcttc

SEQ ID NO: 1216 - DNA, 45 bp, Human
tgcagtgccccgggagggacagatctaaatcagccccagcatttt

SEQ ID NO: 1217 - DNA, 45 bp, Human
tgcagtgctcctcttatccgggagggacccggggagctgtttttt

SEQ ID NO: 1218 - DNA, 45 bp, Human
tgcagtgctccgaacctaaacaggggggattacgagcagtacttc

SEQ ID NO: 1219 - DNA, 57 bp, Human
tgcagtgctccgaacactgggggacaggggcgttggagcaatcagccccagcatttt

SEQ ID NO: 1220 - DNA, 39 bp, Human
tgcagtgccccgaccggggatgccagcgagaagtacttc

SEQ ID NO: 1221 - DNA, 45 bp, Human
tgcagtgccccctgggctagcgggagccggggaacgcagtatttt

SEQ ID NO: 1222 - DNA, 45 bp, Human
tgcagtgctagagcccacggacatagtaatgaaaaactgtttttt

SEQ ID NO: 1223 - DNA, 42 bp, Human
tgcagtgctagagcactagcgggagagtacgagcagtacttc

SEQ ID NO: 1224 - DNA, 42 bp, Human
tgcagtgctagagccctaggggggggtcagccccaacatttt

SEQ ID NO: 1225 - DNA, 45 bp, Human
tgcagtgctagagatgacgggactagccacaatgagcagttcttc

SEQ ID NO: 1226 - DNA, 45 bp, Human
tgcagtgctagagatgataaggggccgggggatgagcagttcttc

SEQ ID NO: 1227 - DNA, 45 bp, Human
tgcagtgctagagatgagggactcctgtcctacgagcagtacttc

SEQ ID NO: 1228 - DNA, 45 bp, Human
tgcagtgctagagatgaggggagagactacaatgagcagttcttc

SEQ ID NO: 1229 - DNA, 54 bp, Human
tgcagtgctagagatttcggcgggagaagggcctcctacaatgagcagttcttc

SEQ ID NO: 1230 - DNA, 42 bp, Human
tgcagtgctagagatttcacctcgtccaatgagcagttcttc

SEQ ID NO: 1231 - DNA, 39 bp, Human
tgcagtgctagagatgggatatacaatgagcagttcttc

SEQ ID NO: 1232 - DNA, 39 bp, Human
tgcagtgctagagacggaaacaccggggagctgtttttt

SEQ ID NO: 1233 - DNA, 48 bp, Human
tgcagtgctagagatgggagcgggatgaacaccggggagctgtttttt

SEQ ID NO: 1234 - DNA, 39 bp, Human
tgcagtgctagggacgggacagggaatggctacaccttc

SEQ ID NO: 1235 - DNA, 48 bp, Human
tgcagtgcaagagacgggacacattatagcaatcagccccagcatttt

SEQ ID NO: 1236 - DNA, 48 bp, Human
tgcagtgctagagatcacctagcgggtgccttcaatgagcagttcttc

SEQ ID NO: 1237 - DNA, 45 bp, Human
tgcagtgctagagatctcggggggtttaaagatacgcagtatttt

SEQ ID NO: 1238 - DNA, 39 bp, Human
tgcagtgctagagatctggggaccggggagctgtttttt

SEQ ID NO: 1239 - DNA, 42 bp, Human
tgcagtgctagagatcttggcactaatgaaaaactgtttttt

SEQ ID NO: 1240 - DNA, 45 bp, Human
tgcagtgctagggacaacatagcaactaatgaaaaactgtttttt

SEQ ID NO: 1241 - DNA, 45 bp, Human
tgcagtgctagagacccagcggcgaacaccggggagctgtttttt

SEQ ID NO: 1242 - DNA, 42 bp, Human
tgcagtgctcgagaccccgacaggctctacgagcagtacttc

SEQ ID NO: 1243 - DNA, 54 bp, Human
tgcagtgctagagatcccgggctagcgggaagggaatgggtgaggcagttcttc

SEQ ID NO: 1244 - DNA, 57 bp, Human
tgcagtgctagagatccgactgcgacgggactagcggactacaatgagcagttcttc

SEQ ID NO: 1245 - DNA, 51 bp, Human
tgcagtgctagagatccatatgcactagcgggaatctacgagcagtacttc

SEQ ID NO: 1246 - DNA, 45 bp, Human
tgcagtgctagagaccagacagggatttttggtgaacagtacttc

SEQ ID NO: 1247 - DNA, 42 bp, Human
tgcagtgctagagatagggaagggggagaggtagatacgcag

SEQ ID NO: 1248 - DNA, 42 bp, Human
tgcagtgctagagacaggcctcactcctacgagcagtacttc

SEQ ID NO: 1249 - DNA, 42 bp, Human
tgcagtgctagagatcggagggggcactatggctacaccttc

SEQ ID NO: 1250 - DNA, 45 bp, Human
tgcagtgctagagatcgcaggcgtatcaatcagccccagcatttt

SEQ ID NO: 1251 - DNA, 39 bp, Human
tgcagtgctagagatcggagctcctacgagcagtacttc

SEQ ID NO: 1252 - DNA, 42 bp, Human
tgcagtgctagagatagcggggccgcctacgagcagtacttc

SEQ ID NO: 1253 - DNA, 45 bp, Human
tgcagtgctagagataccccctcgggcaatcagccccagcatttt

SEQ ID NO: 1254 - DNA, 48 bp, Human
tgcagtgctagagatgttctagcgggaaagatggagacccagtacttc

SEQ ID NO: 1255 - DNA, 42 bp, Human
tgcagtgctagagattgggacagctcctacgagcagtacttc

SEQ ID NO: 1256 - DNA, 45 bp, Human
tgcagtgctagagaaggggacagggatacggatacgcagtatttt

SEQ ID NO: 1257 - DNA, 39 bp, Human
tgcagtgctagagagacagggtactacgagcagtacttc

SEQ ID NO: 1258 - DNA, 54 bp, Human
tgcagtgctaggtttagcgggagggccacccagatgcaagagacccagtacttc

SEQ ID NO: 1259 - DNA, 45 bp, Human
tgcagtgctcgaggggcggcttggtaccaagagacccagtacttc

SEQ ID NO: 1260 - DNA, 42 bp, Human
tgcagtgctagaggagcgggagtacccaatgagcagttcttc

SEQ ID NO: 1261 - DNA, 37 bp, Human
tgcagtgctagaggagggggtaattcacccctccact

SEQ ID NO: 1262 - DNA, 48 bp, Human
tgcagtgctagagggggggttagcgggcgcacagatacgcagtatttt

SEQ ID NO: 1263 - DNA, 39 bp, Human
tgcagtgctaggggtaagcgggactacgagcagtacttc

SEQ ID NO: 1264 - DNA, 45 bp, Human
tgcagtgctagggggctccgggacgactcctacgagcagtacttc

SEQ ID NO: 1265 - DNA, 45 bp, Human
tgcagtgctagaggcatggactatctctcctacgagcagtacttc

SEQ ID NO: 1266 - DNA, 42 bp, Human
tgcagtgctaggggtcctagcgtttcctacgagcagtacttc

SEQ ID NO: 1267 - DNA, 45 bp, Human
tgcagtgctagaggacagtgggctagctcctacgagcagtacttc

SEQ ID NO: 1268 - DNA, 39 bp, Human
tgcagtgctagagggacagcggagtacgagcagtacttc

SEQ ID NO: 1269 - DNA, 42 bp, Human
tgcagtgcaagacacacgagcttccaagagacccagtacttc

SEQ ID NO: 1270 - DNA, 42 bp, Human
tgcagtgctagaatagcgggcgtcgcctacgagcagtacttc

SEQ ID NO: 1271 - DNA, 39 bp, Human
tgcagtgctagaatccttttggagggtgaagctttcttt

SEQ ID NO: 1272 - DNA, 42 bp, Human
tgcagtgctagaaagctgggtattgaggatacgcagtatttt

SEQ ID NO: 1273 - DNA, 42 bp, Human
tgcagtgctagactagcgggagacaccggggagctgtttttt

SEQ ID NO: 1274 - DNA, 42 bp, Human
tgcagtgctaggctcgagcggggggacaatgagcagttcttc

SEQ ID NO: 1275 - DNA, 39 bp, Human
tgcagtgcccgtttgagggacacctacgagcagtacttc

SEQ ID NO: 1276 - DNA, 48 bp, Human
tgcagtgcgagaatgggactagcgggagacaccggggagctgtttttt

SEQ ID NO: 1277 - DNA, 45 bp, Human
tgcagtgcccgcaatggggagccggggcccaatgagcagttcttc

SEQ ID NO: 1278 - DNA, 45 bp, Human
tgcagtgctagaaaccgggacggggcctacaatgagcagttcttc

SEQ ID NO: 1279 - DNA, 36 bp, Human
tgcagtgcccggccggggggctacgagcagtacttc

SEQ ID NO: 1280 - DNA, 42 bp, Human
tgcagtgctagacagggtttaggcaatcagccccagcatttt

SEQ ID NO: 1281 - DNA, 39 bp, Human
tgcagtgcccgaagagcgggagcagatacgcagtatttt

SEQ ID NO: 1282 - DNA, 42 bp, Human
tgcagtgctcgacgacagggatccgcttacgagcagtacttc

SEQ ID NO: 1283 - DNA, 36 bp, Human
tgcagtgctaggagtaggacctacgagcagtacttc

SEQ ID NO: 1284 - DNA, 42 bp, Human
tgcagtgccaggacccgactgatattggagccccagcatttt

SEQ ID NO: 1285 - DNA, 39 bp, Human
tgcagtgcccggactagcggggataatgagcagttcttc

SEQ ID NO: 1286 - DNA, 48 bp, Human
tgcagtgctagaaccagcgggagaggacttgggggcgagcagtacttc

SEQ ID NO: 1287 - DNA, 48 bp, Human
tgcagtgcaaggactagcgggaggttaaatcccgatgagcagttcttc

SEQ ID NO: 1288 - DNA, 35 bp, Human
tcgcaggggccggggagtcagatacgcagtatttt

SEQ ID NO: 1289 - DNA, 36 bp, Human
tgcagtgctagagtcctggattacgagcagtacttc

SEQ ID NO: 1290 - DNA, 42 bp, Human
tgcagtgctagagtaccgggacagaactacgagcagtacttc

SEQ ID NO: 1291 - DNA, 54 bp, Human
tgcagtgctagagtccctccagagacagggacttacacctacgagcagtacttc

SEQ ID NO: 1292 - DNA, 39 bp, Human
tgcagtgctagggtccgggaggcggagacccagtacttc

SEQ ID NO: 1293 - DNA, 45 bp, Human
tgcagtgctagagttcgggagggcctcagcaatgagcagttcttc

SEQ ID NO: 1294 - DNA, 45 bp, Human
tgcagtgctagtgcggacaggggttctggtcgcgagcagtacttc

SEQ ID NO: 1295 - DNA, 33 bp, Human
tgcagtgctagcgccgggggtgagcagttcttc

SEQ ID NO: 1296 - DNA, 45 bp, Human
tgcagtgctagtgcgggggggaccggtcatcatccccagcatttt

SEQ ID NO: 1297 - DNA, 45 bp, Human
tgcagtgctagtgcgggggggaccggtcatcaaccccagtttttt

SEQ ID NO: 1298 - DNA, 45 bp, Human
tgcagtgctagtgcgggggggaccggtcatcagccccagcatttt

SEQ ID NO: 1299 - DNA, 45 bp, Human
tgcagtgctagtgcccgggacggatttacctacgagcagtacttc

SEQ ID NO: 1300 - DNA, 48 bp, Human
tgcagtgctagtgatctagcgggagaaaccacagatacgcagtatttt

SEQ ID NO: 1301 - DNA, 45 bp, Human
tgcagtgcttcgggggcagggataagctcctacgagcagtacttc

SEQ ID NO: 1302 - DNA, 48 bp, Human
tgcagtgctagcggtggggcagggtcatccaaaaacattcagtacttc

SEQ ID NO: 1303 - DNA, 54 bp, Human
tgcagtgctagtgggggactagcgggaggaagtacctacaatgagcagttcttc

SEQ ID NO: 1304 - DNA, 42 bp, Human
tgcagtgctagcggactagcggactcctacgagcagtacttc

SEQ ID NO: 1305 - DNA, 36 bp, Human
tgcagtgctagtgggagtcaagagacccagtacttc

SEQ ID NO: 1306 - DNA, 39 bp, Human
tgcagtgcctccgggacaggggtttctggagctttcttt

SEQ ID NO: 1307 - DNA, 45 bp, Human
tgcagtgctagtcatggatccgggttcacctacgagcagtacttc

SEQ ID NO: 1308 - DNA, 45 bp, Human
tgcagtgcctcaaagtcgggctatccacccagtgagcagttcttc

SEQ ID NO: 1309 - DNA, 42 bp, Human
tgcagtgctagcccaggggttggggacactgaagctttcttt

SEQ ID NO: 1310 - DNA, 51 bp, Human
tgcagtgcatcccctaacgatgactggagggcgtttggtggctacaccttc

SEQ ID NO: 1311 - DNA, 45 bp, Human
tgcagtgctagtcccagggaggggttgaacactgaagctttcttt

SEQ ID NO: 1312 - DNA, 42 bp, Human
tgcagtgctagtccctggcgatcctacaatgagcagttcttc

SEQ ID NO: 1313 - DNA, 45 bp, Human
tgcagtgctagcaggaaggtactcagcacagatacgcagtatttt

SEQ ID NO: 1314 - DNA, 48 bp, Human
tgcagtgctagtagtgacagttactttagcaatcagccccagcatttt

SEQ ID NO: 1315 - DNA, 51 bp, Human
tgcagtgctagtacaattgtgggactagcgggagcatatgagcagttcttc

SEQ ID NO: 1316 - DNA, 48 bp, Human
tgcagtgcctcgaccccgactagcggggggacagatacccagtatttt

SEQ ID NO: 1317 - DNA, 48 bp, Human
tgcagtgccagcacctcaccggtggggggcttagacgagcagtacttc

SEQ ID NO: 1318 - DNA, 61 bp, Human
tgcagtgctacagaaaccgggactagcgggagttgggaagagcctgtggagacccagtact

SEQ ID NO: 1319 - DNA, 45 bp, Human
tgcagtgctaccggggaaagctcctataattcacccctccacttt

SEQ ID NO: 1320 - DNA, 39 bp, Human
tgcagtgccacagggactcttagcgatgagcagttcttc

SEQ ID NO: 1321 - DNA, 48 bp, Human
tgcagtgctaccccgggggggccgagctcctacaatgagcagttcttc

SEQ ID NO: 1322 - DNA, 48 bp, Human
tgcagtgcaacaccaacatcgacacaggtcccctacgagcagtacttc

SEQ ID NO: 1323 - DNA, 36 bp, Human
tgcagtgctacccaacgatcctacgagcagtacttc

SEQ ID NO: 1324 - DNA, 45 bp, Human
tgcagtgctacctccgggacgacgggggcctacgagcagtacttc

SEQ ID NO: 1325 - DNA, 51 bp, Human
tgcagtgcaaccagccccttaggagccctagaggatagggagcagtacttc

SEQ ID NO: 1326 - DNA, 36 bp, Human
tgcagtgcaacgactaagccccacgagcagtacttc

SEQ ID NO: 1327 - DNA, 39 bp, Human
tgcagtgctgtgggcctgggggaagagacccagtacttc

SEQ ID NO: 1328 - DNA, 48 bp, Human
tgcagtgcctggggccatcagggggccggacatgctgagcagttcttc

SEQ ID NO: 1329 - DNA, 51 bp, Human
tgcagtgcgtggagagggacagggggccctactagtcgcgagcagttcttc

SEQ ID NO: 1330 - DNA, 48 bp, Human
tgcagttgtgagggagagggactagcgggagggagcgagcagtacttc

SEQ ID NO: 1331 - DNA, 33 bp, Human
tgcagtgaccccagcagagagacccagtacttc

SEQ ID NO: 1332 - DNA, 42 bp, Human
tgcagtggagcggggaggcgtactcaagagacccagtacttc

SEQ ID NO: 1333 - DNA, 42 bp, Human
tgcagtggaaggagccagggcctccgagagacccagtacttc

SEQ ID NO: 1334 - DNA, 39 bp, Human
tgcagttccctgggacgaaactacaatgagcagttcttc

SEQ ID NO: 1335 - DNA, 39 bp, Human
tgcagcacaccaggggcgggaggttcagagcagtacttc

SEQ ID NO: 1336 - DNA, 45 bp, Human
tgcagtgtcttatcaccctcctcatttgtaaacattcagtacttc

SEQ ID NO: 1337 - DNA, 39 bp, Human
tgcactaccaaggctaagcttcagggtgagcagttcttc

SEQ ID NO: 1338 - DNA, 51 bp, Human
tgcgccagcagcttcaataattccaggtcgggggggcgaggctacaccttc

SEQ ID NO: 1339 - DNA, 48 bp, Human
tgcgccagcagtcatccgggacagccgatcacctacgagcagtacttc

SEQ ID NO: 1340 - DNA, 45 bp, Human
tgcgccagcagtcatcaggacagggggccaactgaagctttcttt

SEQ ID NO: 1341 - DNA, 48 bp, Human
tgcgccagcagccctccgggggtacgagccaaaaacattcagtacttc

SEQ ID NO: 1342 - DNA, 48 bp, Human
tgcgccagcagtcaacggacagaatctggggccaacgtcctgactttc

SEQ ID NO: 1343 - DNA, 60 bp, Human
tgcgccagcagtcaatcgaccttcactagcgggagtcatactactggggagctgtttttt

SEQ ID NO: 1344 - DNA, 51 bp, Human
tgtgccaccggtgatcccgaagggcagaaaaacaccggggagctgtttttt

SEQ ID NO: 1345 - DNA, 33 bp, Human
tgtgccaccggtagtgggaacgagcagtacttc

SEQ ID NO: 1346 - DNA, 45 bp, Human
tgtgccaccatatccagcgggagctcctacaatgagcagttcttc

SEQ ID NO: 1347 - DNA, 36 bp, Human
tgtgccaccatggggacagggggtgaagctttcttt

SEQ ID NO: 1348 - DNA, 33 bp, Human
tgtgccaccatgacagggaatgagcagttcttc

SEQ ID NO: 1349 - DNA, 48 bp, Human
tgtgccaccaggacgatagcgggagacccctacaatgagcagttcttc

SEQ ID NO: 1350 - DNA, 36 bp, Human
tgtgccaccagtgcgggggccggggagctgtttttt

SEQ ID NO: 1351 - DNA, 45 bp, Human
tgtgccaccagtgccccgggggggtacggcgagacccagtacttc

SEQ ID NO: 1352 - DNA, 39 bp, Human
tgtgccaccagtgatttcaggggagacgagcagttcttc

SEQ ID NO: 1353 - DNA, 48 bp, Human
tgtgccaccagtgattttcggacaggggataccggggagctgtttttt

SEQ ID NO: 1354 - DNA, 45 bp, Human
tgtgccaccagtgacctggacagtagacaagagacccagtacttc

SEQ ID NO: 1355 - DNA, 51 bp, Human
tgtgccaccagtgatttgccggaggggtcgaatggaaacaccatatatttt

SEQ ID NO: 1356 - DNA, 42 bp, Human
tgtgccaccagtgatttacagggagatcagccccagcatttt

SEQ ID NO: 1357 - DNA, 51 bp, Human
tgtgccaccagtgatttgcagctagcgggaggttctgacgagctgtttttt

SEQ ID NO: 1358 - DNA, 42 bp, Human
tgtgccaccagtgatttgtcgagcacagatacgcagtatttt

SEQ ID NO: 1359 - DNA, 48 bp, Human
tgtgccaccagtgatctgacaggggctagcacagatacgcagtatttt

SEQ ID NO: 1360 - DNA, 45 bp, Human
tgtgccaccagtgatttgacacccggagggactgaagctttcttt

SEQ ID NO: 1361 - DNA, 39 bp, Human
tgtgccaccagtgatttgtggggtggtgagcagttcttc

SEQ ID NO: 1362 - DNA, 51 bp, Human
tgtgccaccagtgatcccgaagggcagaaaaacaccggggagctgtttttt

SEQ ID NO: 1363 - DNA, 51 bp, Human
tgtgccaccagtgatccaccccggggggcagacaccggggagctgtttttt

SEQ ID NO: 1364 - DNA, 42 bp, Human
tgtgccaccagtgaccctagggcaggggtggtccagtacttc

SEQ ID NO: 1365 - DNA, 42 bp, Human
tgtgccaccagtgacccatccgggggagttgagcagttcttc

SEQ ID NO: 1366 - DNA, 54 bp, Human
tgtgccaccagtgatccctatctacccggccttgccaaaaacattcagtacttc

SEQ ID NO: 1367 - DNA, 45 bp, Human
tgtgccaccagtgaccaacagggttcctacaatgagcagttcttc

SEQ ID NO: 1368 - DNA, 48 bp, Human
tgtgccaccagtgaccagactagcggggttaccggggagctgtttttt

SEQ ID NO: 1369 - DNA, 45 bp, Human
tgtgccacctccgatcggcggactagcacagatacgcagtatttt

SEQ ID NO: 1370 - DNA, 48 bp, Human
tgtgccaccagtgattccggggggaggaaatacactgagcatttcttc

SEQ ID NO: 1371 - DNA, 51 bp, Human
tgtgccaccagtgactcaggcatgagggagcccacagatacgcagtatttt

SEQ ID NO: 1372 - DNA, 42 bp, Human
tgtgccaccagtgattcgcatcaaagccacgagcagtacttc

SEQ ID NO: 1373 - DNA, 48 bp, Human
tgtgccaccagtgattctagcgggagagaatacaatgagcagttcttc

SEQ ID NO: 1374 - DNA, 45 bp, Human
tgtgccaccagtgataccgagagcttgacaaatacccagtatttt

SEQ ID NO: 1375 - DNA, 45 bp, Human
tgtgccaccagtgagggaagggggtacgtcggggagctgtttttt

SEQ ID NO: 1376 - DNA, 48 bp, Human
tgtgccaccagtgaacgagaaatgggacagaccaatgagcagttcttc

SEQ ID NO: 1377 - DNA, 42 bp, Human
tgtgccaccagtgaacggacagcgactcacgagcagtacttc

SEQ ID NO: 1378 - DNA, 45 bp, Human
tgtgccaccagcttcaggacccctgagggaaatacgcagtatttt

SEQ ID NO: 1379 - DNA, 39 bp, Human
tgtgccaccagtggggaggttgcgactgaagctttcttt

SEQ ID NO: 1380 - DNA, 48 bp, Human
tgtgccaccagtcccggacagggggcggtcaccggggagctgtttttt

SEQ ID NO: 1381 - DNA, 42 bp, Human
tgtgccaccaccgcgggggactataacaatgagcagttcttc

SEQ ID NO: 1382 - DNA, 39 bp, Human
tgtgccagcgccgtagctgtgaacactgaagctttcttt

SEQ ID NO: 1383 - DNA, 36 bp, Human
tgtgccagcgaactagccgtcggggagctgtttttt

SEQ ID NO: 1384 - DNA, 33 bp, Human
tgtgccagcggacagggagtgaggcagtatttt

SEQ ID NO: 1385 - DNA, 39 bp, Human
tgtgccagccggatggggtattccggggagctgtttttt

SEQ ID NO: 1386 - DNA, 42 bp, Human
tgtgccagcagtgcccagggggagctctacgagcagtacttc

SEQ ID NO: 1387 - DNA, 39 bp, Human
tgtgccagcagtgcgacagagtttgatgagcagttcttc

SEQ ID NO: 1388 - DNA, 48 bp, Human
tgtgccagcagtgaggccgcgggaggggtaggagagacccagtacttc

SEQ ID NO: 1389 - DNA, 39 bp, Human
tgtgccagcagtgagacagttgggcatggctacaccttc

SEQ ID NO: 1390 - DNA, 51 bp, Human
tgtgccagcagtgaatacgaggacgcgagctcctacaatgagcagttcttc

SEQ ID NO: 1391 - DNA, 54 bp, Human
tgtgccagcagtgaatataaggctccgaaagcacaagatgatacgcagtatttt

SEQ ID NO: 1392 - DNA, 45 bp, Human
tgtgccagcagtgaatactcttggcgcacagatacgcagtatttt

SEQ ID NO: 1393 - DNA, 42 bp, Human
tgtgccagcagttttagcgggagttacaatgagcagttcttc

SEQ ID NO: 1394 - DNA, 36 bp, Human
tgtgccagcagtctagggggctacgagcagtacttc

SEQ ID NO: 1395 - DNA, 33 bp, Human
tgtgccagcagtgtaggggacgagcagtacttc

SEQ ID NO: 1396 - DNA, 33 bp, Human
tgtgccagtaccatgggggatgagcagttcttc

SEQ ID NO: 1397 - DNA, 33 bp, Human
tgtgccagcaccccgggagatacgcagtatttt

SEQ ID NO: 1398 - DNA, 45 bp, Human
tgtgccagccgactcttcttaggatgtcataatgagcagttcttc

SEQ ID NO: 1399 - DNA, 45 bp, Human
tgtgccgccagaatacatccatctccatacaatgatcacttcttc

SEQ ID NO: 1400 - DNA, 42 bp, Human
tgtgccgccagattacagggggcaaattacgaggagtacttc

SEQ ID NO: 1401 - DNA, 45 bp, Human
tgtgcccagcaggggccgctcctgtggcacactgaagctttcttt

SEQ ID NO: 1402 - DNA, 51 bp, Human
tgtgccagtgaaaggcgggaggcctccgtcgcctacaatgagcagttcttc

SEQ ID NO: 1403 - DNA, 42 bp, Human
tgtgccagcttcccggggggggccgacactgaagctttcttt

SEQ ID NO: 1404 - DNA, 45 bp, Human
tgtgccagcggccacggcctacctagcacagatacgcagtatttt

SEQ ID NO: 1405 - DNA, 39 bp, Human
tgtgccagcgggttacgggcctctagtgagcagtacttc

SEQ ID NO: 1406 - DNA, 30 bp, Human
tgtgccagcggctggaagctgcagtacttc

SEQ ID NO: 1407 - DNA, 36 bp, Human
tgtgccagcaagacaggaacctacgagcagtacttc

SEQ ID NO: 1408 - DNA, 39 bp, Human
tgtgccagcaaggtgggtcctccctacgagcagtacttc

SEQ ID NO: 1409 - DNA, 42 bp, Human
tgtgccagcttaggaggtccccccggagagacccagtacttc

SEQ ID NO: 1410 - DNA, 42 bp, Human
tgtgccagcaatctaggaacattcggggattcccgatatttt

SEQ ID NO: 1411 - DNA, 39 bp, Human
tgtgccagcagggatcaagggggggacattcagtacttc

SEQ ID NO: 1412 - DNA, 39 bp, Human
tgtgccagccgggacaggaccgacgaggggcagtacttc

SEQ ID NO: 1413 - DNA, 33 bp, Human
tgtgccagcagggggggtggggagctgtttttt

SEQ ID NO: 1414 - DNA, 45 bp, Human
tgtgccagcagaatacagccatctccatacaatgagcagttcttc

SEQ ID NO: 1415 - DNA, 39 bp, Human
tgtgccagcagaaagacacgtcggtatggctacaccttc

SEQ ID NO: 1416 - DNA, 39 bp, Human
tgtgccagccgactagcgggagtcaacgagcagtacttc

SEQ ID NO: 1417 - DNA, 42 bp, Human
tgtgccagccggctcttagcgggagcctacgagcagtacttc

SEQ ID NO: 1418 - DNA, 39 bp, Human
tgtgccagcagaaccgggagcctcggcgagcagtacttc

SEQ ID NO: 1419 - DNA, 39 bp, Human
tgtgccagcaggacaggggtcgtgaatgagcagttcttc

SEQ ID NO: 1420 - DNA, 45 bp, Human
tgtgccagcagaacatcgacatctccataccatgaccagttcttc

SEQ ID NO: 1421 - DNA, 45 bp, Human
tgtgccagcagtgatggccaggtatcgaatcagccccagcatttt

SEQ ID NO: 1422 - DNA, 42 bp, Human
tgtgccagcagtgaccgtccgggggtagatggctacaccttc

SEQ ID NO: 1423 - DNA, 39 bp, Human
tgtgccagcagtttcggacagggatatggctacaccttc

SEQ ID NO: 1424 - DNA, 39 bp, Human
tgtgccagcagttttgggagagggactgaagctttcttt

SEQ ID NO: 1425 - DNA, 45 bp, Human
tgtgccagcagtttcgggactagcgtctcctacgagcagtacttc

SEQ ID NO: 1426 - DNA, 42 bp, Human
tgtgccagcagttttttgggggataactatggctacaccttc

SEQ ID NO: 1427 - DNA, 45 bp, Human
tgtgccagcagtttcccgggacagggttacaatgagcagttcttc

SEQ ID NO: 1428 - DNA, 39 bp, Human
tgtgccagcagtttctccgacgacaatgagcagttcttc

SEQ ID NO: 1429 - DNA, 39 bp, Human
tgtgccagcagtttcacaggggttcatgagcagttcttc

SEQ ID NO: 1430 - DNA, 48 bp, Human
tgtgccagcagtttcactctcgggacaggggggaacgagcagtacttc

SEQ ID NO: 1431 - DNA, 42 bp, Human
tgtgccagcagttttgtgacagggggccagccccagcatttt

SEQ ID NO: 1432 - DNA, 36 bp, Human
tgtgccagctccggactagactacgagcagtacttc

SEQ ID NO: 1433 - DNA, 39 bp, Human
tgtgccagcagtggctactcaggggacgagcagtacttc

SEQ ID NO: 1434 - DNA, 42 bp, Human
tgtgccagcagccattggacaggggagtccgagcagtacttc

SEQ ID NO: 1435 - DNA, 48 bp, Human
tgtgccagcagtatcgggacaggggggccacaagagacccagtacttc

SEQ ID NO: 1436 - DNA, 45 bp, Human
tgtgccagcagcattaggaggggcgggggggagacccagtacttc

SEQ ID NO: 1437 - DNA, 42 bp, Human
tgtgccagcagtattagcgggagggggaatgagcagttcttc

SEQ ID NO: 1438 - DNA, 39 bp, Human
tgtgccagcagtttagcagggggctacgagcagtacttc

SEQ ID NO: 1439 - DNA, 48 bp, Human
tgtgccagcagtctcgccggactagcgagatgggagacccagtacttc

SEQ ID NO: 1440 - DNA, 51 bp, Human
tgtgccagcagtttagaggaagcgggagtcgcgaggaatgagcagttcttc

SEQ ID NO: 1441 - DNA, 45 bp, Human
tgtgccagcagtttatttgcgggctcctacaatgagcagttcttc

SEQ ID NO: 1442 - DNA, 36 bp, Human
tgtgccagcagtttattcgataatgagcagttcttc

SEQ ID NO: 1443 - DNA, 48 bp, Human
tgtgccagcagtttatttggagcagggggggggaatgagcagttcttc

SEQ ID NO: 1444 - DNA, 39 bp, Human
tgtgccagcagtttattcttgtccggggagctgtttttt

SEQ ID NO: 1445 - DNA, 39 bp, Human
tgtgccagcagtttattcaggggttatgagcagttcttc

SEQ ID NO: 1446 - DNA, 66 bp, Human
tgtgccagcagtttattttctccaggagtgggtactagcgttggaaggggagatacgcagtatttt

SEQ ID NO: 1447 - DNA, 45 bp, Human
tgtgccagcagtttaggggccctttatgaaaacattcattacttc

SEQ ID NO: 1448 - DNA, 39 bp, Human
tgtgccagcagtttaggggccaccggggagctgtttttt

SEQ ID NO: 1449 - DNA, 39 bp, Human
tgtgccagcagtttaggcttcacagatacgcagtatttt

SEQ ID NO: 1450 - DNA, 39 bp, Human
tgtgccagcagtttagggtcagtgacggagcagtacttc

SEQ ID NO: 1451 - DNA, 42 bp, Human
tgtgccagcagtttgattagcgggaactacgagcagtacttc

SEQ ID NO: 1452 - DNA, 45 bp, Human
tgtgccagcagtttaaaggacaggggatcctacgagcagtacttc

SEQ ID NO: 1453 - DNA, 54 bp, Human
tgtgccagcagtttgctctctttcggcgggagggccggagatgagcagttcttc

SEQ ID NO: 1454 - DNA, 54 bp, Human
tgtgccagcagtttgctctctttcggcgggagggccggaaatgagcagttcttc

SEQ ID NO: 1455 - DNA, 39 bp, Human
tgtgccagcagtttaaaccgaaaagagacccagtacttc

SEQ ID NO: 1456 - DNA, 39 bp, Human
tgtgccagcagtttgcaggctaatcagccccagcatttt

SEQ ID NO: 1457 - DNA, 45 bp, Human
tgtgccagcagtctccagggggacaccacctacgagcagtacttc

SEQ ID NO: 1458 - DNA, 45 bp, Human
tgtgccagcagtttaagagctccctcctcctacgagcagtacttc

SEQ ID NO: 1459 - DNA, 39 bp, Human
tgtgccagcagtttaagggaatcgtacgagcagtacttc

SEQ ID NO: 1460 - DNA, 42 bp, Human
tgtgccagcagtttaagaggggccacagatacgcagtatttt

SEQ ID NO: 1461 - DNA, 39 bp, Human
tgtgccagcagtttatcggcagggggcggctacaccttc

SEQ ID NO: 1462 - DNA, 48 bp, Human
tgtgccagcagtttatccgacagggggcgcagcaatgagcagttcttc

SEQ ID NO: 1463 - DNA, 39 bp, Human
tgtgccagcagtttgtctggggccaacgtcctgactttc

SEQ ID NO: 1464 - DNA, 42 bp, Human
tgtgccagcagcctaagcgggggcacctacgagcagtacttc

SEQ ID NO: 1465 - DNA, 48 bp, Human
tgtgccagcagtttaagtcttggtctagcgggaattgagcagttcttc

SEQ ID NO: 1466 - DNA, 48 bp, Human
tgtgccagcagtttatcccttttagggaatgacaatgagcagttcttc

SEQ ID NO: 1467 - DNA, 48 bp, Human
tgtgccagcagtttatcgcctagcgggagttcaaatacgcagtatttt

SEQ ID NO: 1468 - DNA, 45 bp, Human
tgtgccagcagtttaagcaggggactcctcaatgagcagttcttc

SEQ ID NO: 1469 - DNA, 45 bp, Human
tgtgccagcagtttatcgaggggctccctctacgagcagtacttc

SEQ ID NO: 1470 - DNA, 45 bp, Human
tgtgccagcagtttatcaaggacagggtctagtgaagctttcttt

SEQ ID NO: 1471 - DNA, 42 bp, Human
tgtgccagcagtttaagctctcccctcaatgagcagttcttc

SEQ ID NO: 1472 - DNA, 48 bp, Human
tgtgccagcagtttatcctgggggtcaccccaaaatgagcagttcttc

SEQ ID NO: 1473 - DNA, 42 bp, Human
tgtgccagcagtctcaccctaggagggtacgagcagttcttc

SEQ ID NO: 1474 - DNA, 42 bp, Human
tgtgccagcagtttaactagcgggacatacgagcagtacttc

SEQ ID NO: 1475 - DNA, 48 bp, Human
tgtgccagcagtttagttagcctagcgggagagtacgagcagtacttc

SEQ ID NO: 1476 - DNA, 45 bp, Human
tgtgccagcagtttatgggacggaaccatggatacgcagtatttt

SEQ ID NO: 1477 - DNA, 45 bp, Human
tgtgccagcagtttatggggggctggggccaacgtcctgactttc

SEQ ID NO: 1478 - DNA, 39 bp, Human
tgtgccagcagtttatacccacagggaaaactgtttttt

SEQ ID NO: 1479 - DNA, 45 bp, Human
tgtgccagcagtctatactcagggggctcaggcgagcagtacttc

SEQ ID NO: 1480 - DNA, 45 bp, Human
tgtgccagcagccctgacagtcttctctacaatgagcagttcttc

SEQ ID NO: 1481 - DNA, 39 bp, Human
tgtgccagcagcccattcttgtccggcgagctgtatttt

SEQ ID NO: 1482 - DNA, 48 bp, Human
tgtgccagcagccctggggctagcgggagttacaatgagcagttcttc

SEQ ID NO: 1483 - DNA, 42 bp, Human
tgtgccagcagtccgggacagggaggctacgagcagtacttc

SEQ ID NO: 1484 - DNA, 39 bp, Human
tgtgccagcagtcccgggactgccgccgagcagtacttc

SEQ ID NO: 1485 - DNA, 48 bp, Human
tgtgccagcagtccggggacagggggctactacaatgagcagttcttc

SEQ ID NO: 1486 - DNA, 48 bp, Human
tgtgccagcagccccgggacgattgactctggaaacaccatatatttt

SEQ ID NO: 1487 - DNA, 48 bp, Human
tgtgccagcagtccccacccgacagggtctgcagatacgcagtatttt

SEQ ID NO: 1488 - DNA, 45 bp, Human
tgtgccagcagtcccctcgagacagcgggagatggctacaccttc

SEQ ID NO: 1489 - DNA, 45 bp, Human
tgtgccagcagtcccctcaagacggcgggagatggctacaccttc

SEQ ID NO: 1490 - DNA, 36 bp, Human
tgtgccagcagcccaccggggaagacgcagtatttt

SEQ ID NO: 1491 - DNA, 49 bp, Human
vtgtgccagcagtccccggggagcgggagggccctacgagcagtacttc

SEQ ID NO: 1492 - DNA, 51 bp, Human
tgtgccagcagtccaagggttccgggacaagtcaattcacccctccacttt

SEQ ID NO: 1493 - DNA, 42 bp, Human
tgtgccagcagtccatcgacaggggcccctgaagctttcttt

SEQ ID NO: 1494 - DNA, 45 bp, Human
tgtgccagcagtccctcgacagggggcagtcagccccagcatttt

SEQ ID NO: 1495 - DNA, 45 bp, Human
tgtgccagcagtcccaccgcagggggccgaaacgagcagtacttc

SEQ ID NO: 1496 - DNA, 36 bp, Human
tgtgccagcagtccctacaccggggagctgtttttt

SEQ ID NO: 1497 - DNA, 45 bp, Human
tgtgccagcagtcagacctccgggacagcatacgagcagtacttc

SEQ ID NO: 1498 - DNA, 39 bp, Human
tgtgccagcagtagagcggcaaactatggctacaccttc

SEQ ID NO: 1499 - DNA, 42 bp, Human
tgtgccagcagtcgagcggatccccaagagacccagtacttc

SEQ ID NO: 1500 - DNA, 39 bp, Human
tgtgccagcagtcgaggggagtccggggagctgtttttt

SEQ ID NO: 1501 - DNA, 42 bp, Human
tgtgccagcagccgacagggggatacctacgagcagtacttc

SEQ ID NO: 1502 - DNA, 48 bp, Human
tgtgccagcagttcagatgctagctggggaacagatacgcagtatttt

SEQ ID NO: 1503 - DNA, 45 bp, Human
tgtgccagcagttcagagggacaggcgacctacgagcagtacttc

SEQ ID NO: 1504 - DNA, 39 bp, Human
tgtgccagcagttctttcgacagctatggctacaccttc

SEQ ID NO: 1505 - DNA, 39 bp, Human
tgtgccagcagttccggtggcctcaatgagcagttcttc

SEQ ID NO: 1506 - DNA, 39 bp, Human
tgtgccagcagttccggcaggttcactgaagctttcttt

SEQ ID NO: 1507 - DNA, 39 bp, Human
tgtgccagcagttccctccctttatatgaagctttcttt

SEQ ID NO: 1508 - DNA, 57 bp, Human
tgtgccagcagttcccaggacccgggactagcgggagtttacaatgagcagttcttc

SEQ ID NO: 1509 - DNA, 45 bp, Human
tgtgccagcagttcaaccggacagggaaatcagccccagcatttt

SEQ ID NO: 1510 - DNA, 48 bp, Human
tgtgccagcagttcctgggatagcggaagctcctacgagcagtacttc

SEQ ID NO: 1511 - DNA, 39 bp, Human
tgtgccagcagttcatgggactcctacgagcagtacttc

SEQ ID NO: 1512 - DNA, 45 bp, Human
tgtgccagcagttcatacaggggaggtccctacgagcagtacttc

SEQ ID NO: 1513 - DNA, 36 bp, Human
tgtgccagcagtacaggactgtatggctacaccttc

SEQ ID NO: 1514 - DNA, 42 bp, Human
tgtgccagcagtaccgggatgaacaccggggagctgtttttt

SEQ ID NO: 1515 - DNA, 60 bp, Human
tgtgccagcagtacccacaggggggggaatagcgtggatggcaatcagccccagcatttt

SEQ ID NO: 1516 - DNA, 51 bp, Human
tgtgccagcagtgtaagacgggggccaaaaaacaccggggagctgtttttt

SEQ ID NO: 1517 - DNA, 45 bp, Human
tgtgccagcagttgggacaggggaggttctcagccccagcatttt

SEQ ID NO: 1518 - DNA, 42 bp, Human
tgtgccagcagttggggtaggggcaccggggagctgtttttt

SEQ ID NO: 1519 - DNA, 45 bp, Human
tgtgccagcagttggcagaaacggggcacagatacgcagtatttt

SEQ ID NO: 1520 - DNA, 45 bp, Human
tgtgccagcagctggactagcgggagggtagatgagcagttcttc

SEQ ID NO: 1521 - DNA, 39 bp, Human
tgtgccagcagttactttcgcgggaatgagcagttcttc

SEQ ID NO: 1522 - DNA, 39 bp, Human
tgtgccagcagttaccttaagggtaccgagcagtacttc

SEQ ID NO: 1523 - DNA, 33 bp, Human
tgtgccagcactgacgccggggagctgtttttt

SEQ ID NO: 1524 - DNA, 36 bp, Human
tgtgccagcaccggaggcacagatacgcagtatttt

SEQ ID NO: 1525 - DNA, 39 bp, Human
tgtgccagcacaagcggggggaccggggagctgtttttt

SEQ ID NO: 1526 - DNA, 45 bp, Human
tgtgccaccagaatacagccatctccatacaatgagcacttcttc

SEQ ID NO: 1527 - DNA, 39 bp, Human
tgtgccaccaggacaggggtcgtgaatgagcatttcttc

SEQ ID NO: 1528 - DNA, 48 bp, Human
tgtgccaccagtccggggacagggggctactacaatgaccagttcttc

SEQ ID NO: 1529 - DNA, 36 bp, Human
tgtgcctgctgttttggcggacctgaacctttcttt

SEQ ID NO: 1530 - DNA, 33 bp, Human
tgtgcctgcttctggggcgggcagctgtttttt

SEQ ID NO: 1531 - DNA, 45 bp, Human
tgtgcctgccagcctccggaaggtctctcagagacccagtacttc

SEQ ID NO: 1532 - DNA, 39 bp, Human
tgtgccatcaggactagcggcacagatacgcagtatttt

SEQ ID NO: 1533 - DNA, 39 bp, Human
tgtgccaataaacagcgggaccgttaccagcagaacttc

SEQ ID NO: 1534 - DNA, 36 bp, Human
tgtgccagcgcctcaaactacaatgagcagttcttc

SEQ ID NO: 1535 - DNA, 39 bp, Human
tgtgccagcgaggggccggagaacactgaagctttcttt

SEQ ID NO: 1536 - DNA, 48 bp, Human
tgtgccagctttacccgcgtggcagcctctggaaacaccatatatttt

SEQ ID NO: 1537 - DNA, 54 bp, Human
tgtgccagcggttccggggaacctcctgtggtgggggactacgagcagtacttc

SEQ ID NO: 1538 - DNA, 45 bp, Human
tgtgccagcaagctgggacggcaggggattgagacccagtacttc

SEQ ID NO: 1539 - DNA, 48 bp, Human
tgtgccagcaagcaagcgggaggaatcggcacagatacgcagtatttt

SEQ ID NO: 1540 - DNA, 54 bp, Human
tgtgccagtttggcgttggggtggcggactagcggtaccaatgagcagttcttc

SEQ ID NO: 1541 - DNA, 39 bp, Human
tgtgccagcatggctagcgggaaggatgagcagttcttc

SEQ ID NO: 1542 - DNA, 42 bp, Human
tgtgccagcaatagaggacagtcctttggggagcagtacttc

SEQ ID NO: 1543 - DNA, 42 bp, Human
tgtgccagccaatccgggactagcggagacgagcagtacttc

SEQ ID NO: 1544 - DNA, 42 bp, Human
tgtgccagcagggctacagggtctggaaacaccatatatttt

SEQ ID NO: 1545 - DNA, 45 bp, Human
tgtgccagcaggggaaccgggacagccatccacgagcagtacttc

SEQ ID NO: 1546 - DNA, 45 bp, Human
tgtgccagcaggattgacagggccagctcctacgagcagtacttc

SEQ ID NO: 1547 - DNA, 42 bp, Human
tgtgccagcagaatcgacagctcctacaatgagcagttcttc

SEQ ID NO: 1548 - DNA, 42 bp, Human
tgtgccagcagaccaccccagggcggctatggctacaccttc

SEQ ID NO: 1549 - DNA, 48 bp, Human
tgtgccagcaggaggatggacaggcagattgctgagacccagtacttc

SEQ ID NO: 1550 - DNA, 39 bp, Human
tgtgccagcaggtcctcgggtatggatgagcagttcttc

SEQ ID NO: 1551 - DNA, 45 bp, Human
tgtgccagcagaacacagcgggaggcaaacaatgagcagttcttc

SEQ ID NO: 1552 - DNA, 45 bp, Human
tgtgccagccgctacttccgggacagggccggggagctgtttttt

SEQ ID NO: 1553 - DNA, 54 bp, Human
tgtgccagcagtgaaaggaaacgggacaaactacacacagatacgcagtatttt

SEQ ID NO: 1554 - DNA, 42 bp, Human
tgtgccagcagtttcgacagcttgaacactgaagctttcttt

SEQ ID NO: 1555 - DNA, 45 bp, Human
tgtgccagcagtttttttggacagggggccaacgagcagtacttc

SEQ ID NO: 1556 - DNA, 33 bp, Human
tgtgccagcagttttggaggggagcagttcttc

SEQ ID NO: 1557 - DNA, 42 bp, Human
tgtgccagcagttttggcatcctgacctacgagcagtacttc

SEQ ID NO: 1558 - DNA, 48 bp, Human
tgtgccagcagtttcttagcgggagggtcaggcaatgagcagttcttc

SEQ ID NO: 1559 - DNA, 42 bp, Human
tgtgccagcagttttaattcagggaactatggctacaccttc

SEQ ID NO: 1560 - DNA, 54 bp, Human
tgtgccagcagtttccagggacagggggcacttttcgcctacgagcagtacttc

SEQ ID NO: 1561 - DNA, 45 bp, Human
tgtgccagcagtttccaaacagggggcgggactgaagctttcttt

SEQ ID NO: 1562 - DNA, 45 bp, Human
tgtgccagcagtttttcgcgtacgcgcacagatacgcagtatttt

SEQ ID NO: 1563 - DNA, 42 bp, Human
tgtgccagcagtttctggcgctcggggaatgagcagttcttc

SEQ ID NO: 1564 - DNA, 39 bp, Human
tgtgccagttccgggacagggggctacgagcagtacttc

SEQ ID NO: 1565 - DNA, 45 bp, Human
tgtgccagcagtatagacagggaagtgcgctacgagcagtacttc

SEQ ID NO: 1566 - DNA, 30 bp, Human
tgtgccagcagtatagaagagcagttcttc

SEQ ID NO: 1567 - DNA, 39 bp, Human
tgtgccagcagtttagctcgccagaacgagcagtacttc

SEQ ID NO: 1568 - DNA, 45 bp, Human
tgtgccagcagtctggacagggcccgaaaagagacccagtacttc

SEQ ID NO: 1569 - DNA, 39 bp, Human
tgtgccagcagtttagagccattggatggctacaccttc

SEQ ID NO: 1570 - DNA, 39 bp, Human
tgtgccagcagtctggaggtgtggggggagctgtttttt

SEQ ID NO: 1571 - DNA, 45 bp, Human
tgtgccagcagtttagggatagcgggaggctatgagcagttcttc

SEQ ID NO: 1572 - DNA, 36 bp, Human
tgtgccagcagtttaggccgagagacccagtacttc

SEQ ID NO: 1573 - DNA, 45 bp, Human
tgtgccagcagtttagggacagggacgtacaatgagcagttcttc

SEQ ID NO: 1574 - DNA, 39 bp, Human
tgtgccagcagtttaggctattcctacgagcagtacttc

SEQ ID NO: 1575 - DNA, 45 bp, Human
tgtgccagcagtcttaaaaagggagaaatctacgagcagtacttc

SEQ ID NO: 1576 - DNA, 36 bp, Human
tgtgccagcagtttgctagacctcgagcagtacttc

SEQ ID NO: 1577 - DNA, 48 bp, Human
tgtgccagcagtttgttgggtagggctgtgtcctacgagcagtacttc

SEQ ID NO: 1578 - DNA, 51 bp, Human
tgtgccagcagtttactacatagcgcctctggggccaacgtcctgactttc

SEQ ID NO: 1579 - DNA, 48 bp, Human
tgtgccagcagtttactaagggaccagcgggggtacgagcagtacttc

SEQ ID NO: 1580 - DNA, 39 bp, Human
tgtgccagcagtttaaacatggtctatggctacaccttc

SEQ ID NO: 1581 - DNA, 36 bp, Human
tgtgccagcagtctgaacaccggggagctgtttttt

SEQ ID NO: 1582 - DNA, 33 bp, Human
tgtgccagcagtttaccgggaagctacaccttc

SEQ ID NO: 1583 - DNA, 45 bp, Human
tgtgccagcagcctccaagggacagggtggactgaagctttcttt

SEQ ID NO: 1584 - DNA, 42 bp, Human
tgtgccagcagtttacaggggtacccctacgagcagtacttc

SEQ ID NO: 1585 - DNA, 42 bp, Human
tgtgccagcagtttatctatggggtcagatacgcagtatttt

SEQ ID NO: 1586 - DNA, 33 bp, Human
tgtgccagcagtttaacagatacgcagtatttt

SEQ ID NO: 1587 - DNA, 54 bp, Human
tgtgccagcagtttaactagcgggggatactctagcacagatacgcagtatttt

SEQ ID NO: 1588 - DNA, 45 bp, Human
tgtgccagcagtttagtggcgggagaaccttacgagcagtacttc

SEQ ID NO: 1589 - DNA, 39 bp, Human
tgtgccagcagtttagtcttggtttacgagcagtacttc

SEQ ID NO: 1590 - DNA, 42 bp, Human
tgtgccagcagtttatggggcagcacagatacgcagtatttt

SEQ ID NO: 1591 - DNA, 42 bp, Human
tgtgccagcagtttatgggggacactatacgagcagtacttc

SEQ ID NO: 1592 - DNA, 42 bp, Human
tgtgccagcagtatgacagggaccttcaatgagcagttcttc

SEQ ID NO: 1593 - DNA, 45 bp, Human
tgtgccagcagtccagggatcgacctcaatcagccccagcatttt

SEQ ID NO: 1594 - DNA, 39 bp, Human
tgtgccagcagcccgggactagcgaccgagcagtacttc

SEQ ID NO: 1595 - DNA, 51 bp, Human
tgtgccagcagccccatgggggggctagcgggagtctacgagcagtacttc

SEQ ID NO: 1596 - DNA, 45 bp, Human
tgtgccagcagcccacccggagggggtaattcacccctccacttt

SEQ ID NO: 1597 - DNA, 51 bp, Human
tgtgccagcagtccacccgggacaggggttctaggcactgaagctttcttt

SEQ ID NO: 1598 - DNA, 42 bp, Human
tgtgccagcagtcccagagggacattctatggctacaccttc

SEQ ID NO: 1599 - DNA, 45 bp, Human
tgtgccagcagtccctccgggacagggttggagacccagtacttc

SEQ ID NO: 1600 - DNA, 39 bp, Human
tgtgccagcagtccgacagggtctttcgagcagtacttc

SEQ ID NO: 1601 - DNA, 42 bp, Human
tgtgccagcagccctaccgggacaaaaaatggctacaccttc

SEQ ID NO: 1602 - DNA, 42 bp, Human
tgtgccagcagccagacaggggcggcctacgagcagtacttc

SEQ ID NO: 1603 - DNA, 45 bp, Human
tgtgccagcagccgcgggggagaggacaccggggagctgtttttt

SEQ ID NO: 1604 - DNA, 42 bp, Human
tgtgccagcagcagaatagcggatatgaatgagcagttcttc

SEQ ID NO: 1605 - DNA, 45 bp, Human
tgtgccagcagcagattgcgggaacggggagagacccagtacttc

SEQ ID NO: 1606 - DNA, 45 bp, Human
tgtgccagcagctcggacagggtaaggaatcagccccagcatttt

SEQ ID NO: 1607 - DNA, 42 bp, Human
tgtgccagcagttcaatagggacagcctacgagcagtacttc

SEQ ID NO: 1608 - DNA, 48 bp, Human
tgtgccagcagttcctccgggacacaaaacacagatacgcagtatttt

SEQ ID NO: 1609 - DNA, 42 bp, Human
tgtgccagcagctcgacagggttttccgaaaaactgtttttt

SEQ ID NO: 1610 - DNA, 48 bp, Human
tgtgccagcagttcctggactagcggagacacagatacgcagtatttt

SEQ ID NO: 1611 - DNA, 36 bp, Human
tgtgccagcagtacggtccagaatgagcagttcttc

SEQ ID NO: 1612 - DNA, 45 bp, Human
tgtgccagcagttgggacttcagctcctacaatgagcagttcttc

SEQ ID NO: 1613 - DNA, 36 bp, Human
tgtgccagcagttgggggggaaaggagcagtacttc

SEQ ID NO: 1614 - DNA, 39 bp, Human
tgtgccagcagttggggacaggtttccgagcagtacttc

SEQ ID NO: 1615 - DNA, 42 bp, Human
tgtgccagcagttatctagcgggagcctacgagcagtacttc

SEQ ID NO: 1616 - DNA, 45 bp, Human
tgtgccagcaccgatggactagcgggagcctacgagcagtacttc

SEQ ID NO: 1617 - DNA, 39 bp, Human
tgtgccagcacgataacagagaacactgaagctttcttt

SEQ ID NO: 1618 - DNA, 48 bp, Human
tgtgccagcaccttgggcctagcgggacccccctacgagcagtacttc

SEQ ID NO: 1619 - DNA, 45 bp, Human
tgtgccaccaggttcatggcgggtccaacccacgagcagtacttc

SEQ ID NO: 1620 - DNA, 45 bp, Human
tgtgccaccagtcgtagcgggagcttgacagatacgcagtatttt

SEQ ID NO: 1621 - DNA, 42 bp, Human
tgcagcgctgggacaggtggcactaatgaaaaactgtttttt

SEQ ID NO: 1622 - DNA, 39 bp, Human
tgcagcgcccgacaggggagcgcctacgagcagtacttc

SEQ ID NO: 1623 - DNA, 51 bp, Human
tgcagcggggagggcaggtcgactagcggggggttcgatgagcagttcttc

SEQ ID NO: 1624 - DNA, 45 bp, Human
tgcagcacaagactagcgggagagcgccaagagacccagtacttc

SEQ ID NO: 1625 - DNA, 45 bp, Human
tgcagcgtcgctgactctattggagccaaaaacattcagtacttc

SEQ ID NO: 1626 - DNA, 39 bp, Human
tgcagcgtcgctagcgggaccggctacgagcagtacttc

SEQ ID NO: 1627 - DNA, 45 bp, Human
tgcagcgttgatccgacgggtcggggccaagagacccagtacttc

SEQ ID NO: 1628 - DNA, 36 bp, Human
tgcagcgtggacaggggcgaaaacattcagtacttc

SEQ ID NO: 1629 - DNA, 33 bp, Human
tgcagcgtagacaggaacactgaagctttcttt

SEQ ID NO: 1630 - DNA, 42 bp, Human
tgcagcgttgattctaggggctcctacaatgagcagttcttc

SEQ ID NO: 1631 - DNA, 42 bp, Human
tgcagcgttgacgtccagggccggacagatacgcagtatttt

SEQ ID NO: 1632 - DNA, 33 bp, Human
tgcagcgttgaagcagtcaggaccctgttcttc

SEQ ID NO: 1633 - DNA, 48 bp, Human
tgcagcgttgaagcgtgggagcgggggaacaccggggagctgtttttt

SEQ ID NO: 1634 - DNA, 48 bp, Human
tgcagcgttgaagatggaggagggtcgaacaccggggagctgtttttt

SEQ ID NO: 1635 - DNA, 45 bp, Human
tgcagcgttgaagaccccctagcggaagtagagacccagtacttc

SEQ ID NO: 1636 - DNA, 42 bp, Human
tgcagcgttgaagatccacaggggaactatggctacaccttc

SEQ ID NO: 1637 - DNA, 51 bp, Human
tgcagcgttgaagactgggatagcggaaccgccgcagatacgcagtatttt

SEQ ID NO: 1638 - DNA, 36 bp, Human
tgcagcgttgaagaaacaaactacgagcagtacttc

SEQ ID NO: 1639 - DNA, 30 bp, Human
tgcagcgtcgagggggaggagcagttcttc

SEQ ID NO: 1640 - DNA, 42 bp, Human
tgcagcgttgaaggaaatgggggggccaacgtcctgactttc

SEQ ID NO: 1641 - DNA, 39 bp, Human
tgcagcgttgaggggcgcctaggaaacaccatatatttt

SEQ ID NO: 1642 - DNA, 45 bp, Human
tgcagcgttgaaggtagcgggagaacctacaatgagcagttcttc

SEQ ID NO: 1643 - DNA, 51 bp, Human
tgcagcgttgaagggacggtggacagggaagcgtgggagacccagtacttc

SEQ ID NO: 1644 - DNA, 33 bp, Human
tgcagcgttgaactattcaacgagcagtacttc

SEQ ID NO: 1645 - DNA, 39 bp, Human
tgcagcgttgaattagggggggcctacgagcagtacttc

SEQ ID NO: 1646 - DNA, 42 bp, Human
tgcagcgttgaaactagcgggaggttcaatgagcagttcttc

SEQ ID NO: 1647 - DNA, 42 bp, Human
tgcagcgttgaggtggcggggggcggggagacccagtacttc

SEQ ID NO: 1648 - DNA, 39 bp, Human
tgcagcgttgaagttttgggtaactatggctacaccttc

SEQ ID NO: 1649 - DNA, 48 bp, Human
tgcagcgttgaatggtctgaggggcactcctacaatgagcagttcttc

SEQ ID NO: 1650 - DNA, 42 bp, Human
tgcagcgttggagctgggggcactaatgaaaaactgtttttt

SEQ ID NO: 1651 - DNA, 42 bp, Human
tgcagcgttggatttaggggaaccggatacgagcagtacttc

SEQ ID NO: 1652 - DNA, 36 bp, Human
tgcagcgttggggggtcgttctatggctacaccttc

SEQ ID NO: 1653 - DNA, 36 bp, Human
tgcagcgttgggatcgtttcggaaggctacaccttc

SEQ ID NO: 1654 - DNA, 33 bp, Human
tgcagcgtcgggactacctacgagcagtacttc

SEQ ID NO: 1655 - DNA, 33 bp, Human
tgcagcgtgaagacagggaatagctacaccttc

SEQ ID NO: 1656 - DNA, 48 bp, Human
tgcagcgttctcggtacagaatcaagctcctacaatgagcagttcttc

SEQ ID NO: 1657 - DNA, 36 bp, Human
tgcagcgttccccggttgggcggggagctgtttttt

SEQ ID NO: 1658 - DNA, 33 bp, Human
tgcagcgtacaggactactacgagcagtacttc

SEQ ID NO: 1659 - DNA, 39 bp, Human
tgcagcgttcaaagcggttacaccggggagctgtttttt

SEQ ID NO: 1660 - DNA, 42 bp, Human
tgcagcgtcacggacgtccagttctcctacgagcagtacttc

SEQ ID NO: 1661 - DNA, 42 bp, Human
tgcagcgttgttggggacagcttcacagatacgcagtatttt

SEQ ID NO: 1662 - DNA, 36 bp, Human
tgcagcgttgttagtggcgcctacgagcagtacttc

SEQ ID NO: 1663 - DNA, 39 bp, Human
tgcagcgtttggggggggggaagctacgagcagtacttc

SEQ ID NO: 1664 - DNA, 36 bp, Human
tgtgcctgccgggactcggggaatgagcagttcttc

SEQ ID NO: 1665 - DNA, 36 bp, Human
tgtgcccgaggctgggggaacgacgagcagtacttc

SEQ ID NO: 1666 - DNA, 33 bp, Human
tgtgcctgggacggatacaatgagcagttcttc

SEQ ID NO: 1667 - DNA, 30 bp, Human
tgtgcctggggcttagatacgcagtatttt

SEQ ID NO: 1668 - DNA, 30 bp, Human
tgtgcctggggcttaaatacgcagtatttt

SEQ ID NO: 1669 - DNA, 39 bp, Human
tgtgcctggaaattgacagggctctacgagcagtacttc

SEQ ID NO: 1670 - DNA, 42 bp, Human
tgtgcctggaatgtacaagcgggaaaagagacccagtacttc

SEQ ID NO: 1671 - DNA, 42 bp, Human
tgtgcctggagagccgggacaggggtgaatgagcagttcttc

SEQ ID NO: 1672 - DNA, 33 bp, Human
tgtgcctggagaaatagcggggagcagtacttc

SEQ ID NO: 1673 - DNA, 45 bp, Human
tgtgcctggagaactcttagcggggcgtacaatgagcagttcttc

SEQ ID NO: 1674 - DNA, 39 bp, Human
tgtgcctggagtgcagacatgaacactgaagctttcttt

SEQ ID NO: 1675 - DNA, 36 bp, Human
tgtgcctggagcgacggtgggaagacccagtacttc

SEQ ID NO: 1676 - DNA, 36 bp, Human
tgtgcctggagtgaaggtaaccatgagcagttcttc

SEQ ID NO: 1677 - DNA, 42 bp, Human
tgtgcctggagtggggacagattccaagatacgcagtatttt

SEQ ID NO: 1678 - DNA, 39 bp, Human
tgtgcctggagtggaactagctacaatgagcagttcttc

SEQ ID NO: 1679 - DNA, 30 bp, Human
tgtgcctggagtggctacgagcagtacttc

SEQ ID NO: 1680 - DNA, 42 bp, Human
tgtgcctggagtaaaaccgggacaggggacgagcagtacttc

SEQ ID NO: 1681 - DNA, 42 bp, Human
tgtgcctggagtcctactagcgggaggaatgagcagttcttc

SEQ ID NO: 1682 - DNA, 42 bp, Human
tgtgcctggagccgggacagtggcacagatacgcagtatttt

SEQ ID NO: 1683 - DNA, 51 bp, Human
tgtgcctggagtagtttcgggggactagcgggttcctacgagcagtacttc

SEQ ID NO: 1684 - DNA, 39 bp, Human
tgtgcctggagtacagggggcgcgactgaagctttcttt

SEQ ID NO: 1685 - DNA, 42 bp, Human
tgtgcctggagtgtagggacagggggatttgagcagttcttc

SEQ ID NO: 1686 - DNA, 42 bp, Human
tgtgcctggagtgtacaagcgggaaaagagacccattacttc

SEQ ID NO: 1687 - DNA, 42 bp, Human
tgtgcctggagtgtacaagcgggaaaagagacccagtacttc

SEQ ID NO: 1688 - DNA, 51 bp, Human
tgtgcctggagtgtacaagggtattgggaggtccactatggctacaccttc

SEQ ID NO: 1689 - DNA, 41 bp, Human
gtgcctggagtgtacaaccgggaaaagaaaccccttacttc

SEQ ID NO: 1690 - DNA, 42 bp, Human
tgtgcctggagtgtacaaagcgggtcccatgagcagttcttc

SEQ ID NO: 1691 - DNA, 39 bp, Human
tgtgcctggagtgtatcggtgagcctcgagcagtacttc

SEQ ID NO: 1692 - DNA, 48 bp, Human
tgtgcctggagtgtaacgggattcccacccaccggggagctgtttttt

SEQ ID NO: 1693 - DNA, 42 bp, Human
tgtgcctggagtgtagtggggggggggaatggttaccccttc

SEQ ID NO: 1694 - DNA, 42 bp, Human
tgtgcctgggtataccgcgcagctaacactgaagctttcttt

SEQ ID NO: 1695 - DNA, 48 bp, Human
tgtccctccggcagggggcgcccgggagggccggagacccagtacttc

SEQ ID NO: 1696 - protein, 14 aa, Human
CAGAPRINTGELFF

SEQ ID NO: 1697 - protein, 12 aa, Human
CAGFAPNEPQHF

SEQ ID NO: 1698 - protein, 11 aa, Human
CAKQRNTEAFF

SEQ ID NO: 1699 - protein, 13 aa, Human
CALEEGGYNEQFF

SEQ ID NO: 1700 - protein, 14 aa, Human
CANSEAPIDYDQYF

SEQ ID NO: 1701 - protein, 14 aa, Human
CANSEAPIDYEQYF

SEQ ID NO: 1702 - protein, 16 aa, Human
CANSIDWRKGPDTQYF

SEQ ID NO: 1703 - protein, 13 aa, Human
CANVFHEGHGYTF

SEQ ID NO: 1704 - protein, 11 aa, Human
CARDITDTQYF

SEQ ID NO: 1705 - protein, 12 aa, Human
CASDPGIYGYTF

SEQ ID NO: 1706 - protein, 14 aa, Human
CASDSGRSTDTQYF

SEQ ID NO: 1707 - protein, 16 aa, Human
CASGGLTSGSRDTQYF

SEQ ID NO: 1708 - protein, 13 aa, Human
CASGIQGRNEQFF

SEQ ID NO: 1709 - protein, 17 aa, Human
CASKVTEWVQAKNIQYF

SEQ ID NO: 1710 - protein, 13 aa, Human
CASLGRGRQPQHF

SEQ ID NO: 1711 - protein, 15 aa, Human
CASNDVVYSNHPLDF

SEQ ID NO: 1712 - protein, 14 aa, Human
CASNEAPSDYEQYF

SEQ ID NO: 1713 - protein, 14 aa, Human
CASNESTSDYEQYF

SEQ ID NO: 1714 - protein, 15 aa, Human
CASNRPDSTYYEQYF

SEQ ID NO: 1715 - protein, 15 aa, Human
CASRDGTYYTGELFF

SEQ ID NO: 1716 - protein, 13 aa, Human
CASRDRGAGELFF

SEQ ID NO: 1717 - protein, 12 aa, Human
CASRGGPYEQYF

SEQ ID NO: 1718 - protein, 17 aa, Human
CASRVTEWVLAKNIQYF

SEQ ID NO: 1719 - protein, 16 aa, Human
CASSARTTGDQETQYF

SEQ ID NO: 1720 - protein, 17 aa, Human
CASSDGKDTFMNTEAFF

SEQ ID NO: 1721 - protein, 15 aa, Human
CASSDPHRDSTEAFF

SEQ ID NO: 1722 - protein, 15 aa, Human
CASSDVGYSNQPQHF

SEQ ID NO: 1723 - protein, 14 aa, Human
CASSEAPSDYEQYF

SEQ ID NO: 1724 - protein, 14 aa, Human
CASSEAPSNYEQYF

SEQ ID NO: 1725 - protein, 15 aa, Human
CASSEAQREGDTQYF

SEQ ID NO: 1726 - protein, 14 aa, Human
CASSEATSDYEQYF

SEQ ID NO: 1727 - protein, 14 aa, Human
CASSEDGSSGPQHF

SEQ ID NO: 1728 - protein, 15 aa, Human
CASSEGGGGAETQYF

SEQ ID NO: 1729 - protein, 15 aa, Human
CASSEGGGGQETQYF

SEQ ID NO: 1730 - protein, 15 aa, Human
CASSEGLAITDTQYF

SEQ ID NO: 1731 - protein, 16 aa, Human
CASSEGSSGFSYEQYF

SEQ ID NO: 1732 - protein, 15 aa, Human
CASSEGTSGSYEQYF

SEQ ID NO: 1733 - protein, 16 aa, Human
CASSENGAGTSDEQFF

SEQ ID NO: 1734 - protein, 15 aa, Human
CASSESGTIMETQYF

SEQ ID NO: 1735 - protein, 15 aa, Human
CASSETGSSTDTQYF

SEQ ID NO: 1736 - protein, 13 aa, Human
CASSETGTYEQYF

SEQ ID NO: 1737 - protein, 15 aa, Human
CASSGEAGGGETQYF

SEQ ID NO: 1738 - protein, 15 aa, Human
CASSGGAGGGETQYF

SEQ ID NO: 1739 - protein, 12 aa, Human
CASSGGNEPHDF

SEQ ID NO: 1740 - protein, 12 aa, Human
CASSGGNEPQHF

SEQ ID NO: 1741 - protein, 12 aa, Human
CASSGGNQPHDF

SEQ ID NO: 1742 - protein, 12 aa, Human
CASSGGNQSHDF

SEQ ID NO: 1743 - protein, 17 aa, Human
CASSGTLLAGARDEQFF

SEQ ID NO: 1744 - protein, 17 aa, Human
CASSGTLLSQARDEQFF

SEQ ID NO: 1745 - protein, 17 aa, Human
CASSGTSGRPLSYEQYF

SEQ ID NO: 1746 - protein, 15 aa, Human
CASSLFWAPPDEQYF

SEQ ID NO: 1747 - protein, 11 aa, Human
CASSLTDTHYF

SEQ ID NO: 1748 - protein, 11 aa, Human
CASSLTDTQYF

SEQ ID NO: 1749 - protein, 15 aa, Human
CASSLVNGRADEQYF

SEQ ID NO: 1750 - protein, 13 aa, Human
CASSMTRSTEAFF

SEQ ID NO: 1751 - protein, 14 aa, Human
CASSNGGGNTEAFF

SEQ ID NO: 1752 - protein, 15 aa, Human
CASSPESLRTDTQYF

SEQ ID NO: 1753 - protein, 14 aa, Human
CASSQGLEADEQYF

SEQ ID NO: 1754 - protein, 15 aa, Human
CASSSGTSPYNEQFF

SEQ ID NO: 1755 - protein, 13 aa, Human
CASSSPGSYEQYF

SEQ ID NO: 1756 - protein, 13 aa, Human
CASSSSGADTQYF

SEQ ID NO: 1757 - protein, 15 aa, Human
CASSTLAGSTDTQYF

SEQ ID NO: 1758 - protein, 12 aa, Human
CASSVQGLEAFF

SEQ ID NO: 1759 - protein, 14 aa, Human
CASTEAPNDYEQYF

SEQ ID NO: 1760 - protein, 14 aa, Human
CASTFEGDTDTQYF

SEQ ID NO: 1761 - protein, 14 aa, Human
CASGHLRSYNEQFF

SEQ ID NO: 1762 - protein, 16 aa, Human
CASHYRASVNTGELFF

SEQ ID NO: 1763 - protein, 12 aa, Human
CASSEGLYGYTF

SEQ ID NO: 1764 - protein, 16 aa, Human
CASSHLAASSYNEQFF

SEQ ID NO: 1765 - protein, 17 aa, Human
CASSHSMGGGGYNEQFF

SEQ ID NO: 1766 - protein, 16 aa, Human
CASSHTSGRAGNEQFF

SEQ ID NO: 1767 - protein, 16 aa, Human
CASSLRSGGGGDTQYF

SEQ ID NO: 1768 - protein, 16 aa, Human
CASSLSGNRSIQTPSF

SEQ ID NO: 1769 - protein, 15 aa, Human
CASSLSSGRTYEQYF

SEQ ID NO: 1770 - protein, 13 aa, Human
CASSPAGTREQFF

SEQ ID NO: 1771 - protein, 15 aa, Human
CASSPLAGFTDTQYF

SEQ ID NO: 1772 - protein, 16 aa, Human
CASSPPTGDFYSPLHF

SEQ ID NO: 1773 - protein, 15 aa, Human
CASSPRAGAGGEQFF

SEQ ID NO: 1774 - protein, 14 aa, Human
CASSPRPGGEKLFF

SEQ ID NO: 1775 - protein, 15 aa, Human
CASSPSGTLEATQYF

SEQ ID NO: 1776 - protein, 15 aa, Human
CASSPSRGAYNEQFF

SEQ ID NO: 1777 - protein, 15 aa, Human
CASSPWTGSSYEQYF

SEQ ID NO: 1778 - protein, 16 aa, Human
CASSQAQGSLSYEQYF

SEQ ID NO: 1779 - protein, 14 aa, Human
CASSQDATGNGYTF

SEQ ID NO: 1780 - protein, 17 aa, Human
CASSQDRTGVGNQPQHF

SEQ ID NO: 1781 - protein, 14 aa, Human
CASSQDSGPYEQYF

SEQ ID NO: 1782 - protein, 14 aa, Human
CASSQDSPSYGYTF

SEQ ID NO: 1783 - protein, 17 aa, Human
CASSQEGPYSSYNEQFF

SEQ ID NO: 1784 - protein, 12 aa, Human
CASSQGMDGYAF

SEQ ID NO: 1785 - protein, 15 aa, Human
CASSQPGQRRGGYTF

SEQ ID NO: 1786 - protein, 16 aa, Human
CASSQPTSGSIYEQFF

SEQ ID NO: 1787 - protein, 15 aa, Human
CASSQQLREGDEQYF

SEQ ID NO: 1788 - protein, 16 aa, Human
CASSQRVGLATNEQFF

SEQ ID NO: 1789 - protein, 15 aa, Human
CASSQSGGKTYEQYF

SEQ ID NO: 1790 - protein, 18 aa, Human
CASSQVIGDLSGANVLTF

SEQ ID NO: 1791 - protein, 19 aa, Human
CASSRGLTREGLSYNEQFF

SEQ ID NO: 1792 - protein, 17 aa, Human
CASSRPAGALGANVLTF

SEQ ID NO: 1793 - protein, 14 aa, Human
CASSRRQQNEKLFF

SEQ ID NO: 1794 - protein, 18 aa, Human
CASSSQWTEEPKGYGYTF

SEQ ID NO: 1795 - protein, 14 aa, Human
CASTPSTENTEAFF

SEQ ID NO: 1796 - protein, 15 aa, Human
CAGSQGLGRGNTIYF

SEQ ID NO: 1797 - protein, 12 aa, Human
CASRQGPNEQFF

SEQ ID NO: 1798 - protein, 15 aa, Human
CASRTGQGSTGELFF

SEQ ID NO: 1799 - protein, 10 aa, Human
CASSDGSQYF

SEQ ID NO: 1800 - protein, 13 aa, Human
CASSHPQAGELFF

SEQ ID NO: 1801 - protein, 17 aa, Human
CASSHPRLAGDDNEQFF

SEQ ID NO: 1802 - protein, 16 aa, Human
CASSHPRTDHQETQYF

SEQ ID NO: 1803 - protein, 16 aa, Human
CASSHPSAGSAGEQYF

SEQ ID NO: 1804 - protein, 15 aa, Human
CASSHRRQVNSPLHF

SEQ ID NO: 1805 - protein, 17 aa, Human
CASSKGEGRISGNTIYF

SEQ ID NO: 1806 - protein, 15 aa, Human
CASSLDRTNTGELFF

SEQ ID NO: 1807 - protein, 12 aa, Human
CASSLGDEEQFF

SEQ ID NO: 1808 - protein, 14 aa, Human
CASSLGLTNNEQFF

SEQ ID NO: 1809 - protein, 16 aa, Human
CASSLRLAGDAETQYF

SEQ ID NO: 1810 - protein, 16 aa, Human
CASSLTVAGGMNEQYF

SEQ ID NO: 1811 - protein, 15 aa, Human
CASSLVAKSYNEQFF

SEQ ID NO: 1812 - protein, 16 aa, Human
CASSLVQYSPNTEAFF

SEQ ID NO: 1813 - protein, 16 aa, Human
CASSNGQGRNNSPLHF

SEQ ID NO: 1814 - protein, 16 aa, Human
CASSPAGTLNTGELFF

SEQ ID NO: 1815 - protein, 14 aa, Human
CASSPGGSNYGYTF

SEQ ID NO: 1816 - protein, 15 aa, Human
CASSPGQHSNQPQHF

SEQ ID NO: 1817 - protein, 16 aa, Human
CASSPLDSGAGTDQYF

SEQ ID NO: 1818 - protein, 16 aa, Human
CASSPLDSGAGTEQYF

SEQ ID NO: 1819 - protein, 15 aa, Human
CASSPLRVGPYEQYF

SEQ ID NO: 1820 - protein, 12 aa, Human
CASSPPEGTQYF

SEQ ID NO: 1821 - protein, 15 aa, Human
CASSPRSSNTGELFF

SEQ ID NO: 1822 - protein, 15 aa, Human
CASSPRTETNYGYTF

SEQ ID NO: 1823 - protein, 15 aa, Human
CASSPRTSGEETQYF

SEQ ID NO: 1824 - protein, 15 aa, Human
CASSPSGGALETQYF

SEQ ID NO: 1825 - protein, 14 aa, Human
CASSPSGQGRSAFF

SEQ ID NO: 1826 - protein, 17 aa, Human
CASSPSHTGNTGNTIYF

SEQ ID NO: 1827 - protein, 13 aa, Human
CASSPSLYNEQFF

SEQ ID NO: 1828 - protein, 15 aa, Human
CASSPSRGPSYEQYF

SEQ ID NO: 1829 - protein, 13 aa, Human
CASSPYTGNTIYF

SEQ ID NO: 1830 - protein, 16 aa, Human
CASSQAFQGSNTEAFF

SEQ ID NO: 1831 - protein, 14 aa, Human
CASSQAGAAYEQYF

SEQ ID NO: 1832 - protein, 17 aa, Human
CASSQASGLAGGYEQYF

SEQ ID NO: 1833 - protein, 15 aa, Human
CASSQDERVTETQYF

SEQ ID NO: 1834 - protein, 14 aa, Human
CASSQDFGRTEQYF

SEQ ID NO: 1835 - protein, 17 aa, Human
CASSQDGEGGADYGYTF

SEQ ID NO: 1836 - protein, 16 aa, Human
CASSQDIGTGPTEAFF

SEQ ID NO: 1837 - protein, 16 aa, Human
CASSQDLGGSGNTIYF

SEQ ID NO: 1838 - protein, 15 aa, Human
CASSQDLGPSTEAFF

SEQ ID NO: 1839 - protein, 16 aa, Human
CASSQDPGMETGELFF

SEQ ID NO: 1840 - protein, 13 aa, Human
CASSQDPGYEQYF

SEQ ID NO: 1841 - protein, 13 aa, Human
CASSQDSDQTHHF

SEQ ID NO: 1842 - protein, 16 aa, Human
CASSQDSGSSYNEQFF

SEQ ID NO: 1843 - protein, 15 aa, Human
CASSQDSGIGQPQHF

SEQ ID NO: 1844 - protein, 15 aa, Human
CASSQDSGPSYEQYF

SEQ ID NO: 1845 - protein, 14 aa, Human
CASSQDSHTGELFF

SEQ ID NO: 1846 - protein, 13 aa, Human
CASSQDSNQPQHF

SEQ ID NO: 1847 - protein, 18 aa, Human
CASSQDSPLASSSYEQYF

SEQ ID NO: 1848 - protein, 14 aa, Human
CASSQDTYQETQYF

SEQ ID NO: 1849 - protein, 15 aa, Human
CASSQEDRVSETQYF

SEQ ID NO: 1850 - protein, 17 aa, Human
CASSQEEGGMINQPQHF

SEQ ID NO: 1851 - protein, 14 aa, Human
CASSQEFGGDEQFF

SEQ ID NO: 1852 - protein, 17 aa, Human
CASSQEGAGLSTDTQYF

SEQ ID NO: 1853 - protein, 14 aa, Human
CASSQEGASHGYTF

SEQ ID NO: 1854 - protein, 18 aa, Human
CASSQEGQLAEGGGELFF

SEQ ID NO: 1855 - protein, 14 aa, Human
CASSQEGRGNEQFF

SEQ ID NO: 1856 - protein, 15 aa, Human
CASSQEHRGLYEQYF

SEQ ID NO: 1857 - protein, 17 aa, Human
CASSQELGGGTKYEQYF

SEQ ID NO: 1858 - protein, 15 aa, Human
CASSQEPGGVEKLFF

SEQ ID NO: 1859 - protein, 16 aa, Human
CASSQEQAGGVVTQYF

SEQ ID NO: 1860 - protein, 16 aa, Human
CASSQERGEGRDTQYF

SEQ ID NO: 1861 - protein, 17 aa, Human
CASSQERGRISGNTIYF

SEQ ID NO: 1862 - protein, 15 aa, Human
CASSQEVAGVREQYF

SEQ ID NO: 1863 - protein, 16 aa, Human
CASSQEWPESGHTIYF

SEQ ID NO: 1864 - protein, 14 aa, Human
CASSQGAGGYEQYF

SEQ ID NO: 1865 - protein, 15 aa, Human
CASSQGDRNYSPLHF

SEQ ID NO: 1866 - protein, 15 aa, Human
CASSQGDRYVTEAFF

SEQ ID NO: 1867 - protein, 14 aa, Human
CASSQGDSSYEQYF

SEQ ID NO: 1868 - protein, 14 aa, Human
CASSQGGEGYEQYF

SEQ ID NO: 1869 - protein, 15 aa, Human
CASSQGGGETYEQYF

SEQ ID NO: 1870 - protein, 17 aa, Human
CASSQGGGQGFITEAFF

SEQ ID NO: 1871 - protein, 13 aa, Human
CASSQGGPGELFF

SEQ ID NO: 1872 - protein, 14 aa, Human
CASSQGGTQETQYF

SEQ ID NO: 1873 - protein, 16 aa, Human
CASSQGLAGGPGTQYF

SEQ ID NO: 1874 - protein, 19 aa, Human
CASSQGMRASWGFDNEQFF

SEQ ID NO: 1875 - protein, 15 aa, Human
CASSQGRYSNQPQHF

SEQ ID NO: 1876 - protein, 16 aa, Human
CASSQGVGRANYGYTF

SEQ ID NO: 1877 - protein, 16 aa, Human
CASSQKLAGDTDTQYF

SEQ ID NO: 1878 - protein, 17 aa, Human
CASSQKPGLAGFNEQYF

SEQ ID NO: 1879 - protein, 14 aa, Human
CASSQKWGNHPQHF

SEQ ID NO: 1880 - protein, 19 aa, Human
CASSQKYRVLELGTDTQYF

SEQ ID NO: 1881 - protein, 16 aa, Human
CASSQLAGGVADTQYF

SEQ ID NO: 1882 - protein, 17 aa, Human
CASSQLGTGGAGETQYF

SEQ ID NO: 1883 - protein, 16 aa, Human
CASSQPGLAGYDEQFF

SEQ ID NO: 1884 - protein, 15 aa, Human
CASSQPLGQKETQYF

SEQ ID NO: 1885 - protein, 15 aa, Human
CASSQRAVGDYGYTF

SEQ ID NO: 1886 - protein, 16 aa, Human
CASSQRGTSGKNEQFF

SEQ ID NO: 1887 - protein, 14 aa, Human
CASSQRQTGYEQYF

SEQ ID NO: 1888 - protein, 18 aa, Human
CASSQSLAVATSYNEQFF

SEQ ID NO: 1889 - protein, 16 aa, Human
CASSQTGRGPSYEQYF

SEQ ID NO: 1890 - protein, 14 aa, Human
CASSQTGTSYEQYF

SEQ ID NO: 1891 - protein, 16 aa, Human
CASSQVRSGGAYEQYF

SEQ ID NO: 1892 - protein, 15 aa, Human
CASSQVSEANYGYTF

SEQ ID NO: 1893 - protein, 15 aa, Human
CASSQVTGGSYGYTF

SEQ ID NO: 1894 - protein, 16 aa, Human
CASSQVTGTGRYEQYF

SEQ ID NO: 1895 - protein, 13 aa, Human
CASSQVTSYEQYF

SEQ ID NO: 1896 - protein, 16 aa, Human
CASSRGLAGGHNEQFF

SEQ ID NO: 1897 - protein, 18 aa, Human
CASSSDTSGSTRGNEQFF

SEQ ID NO: 1898 - protein, 13 aa, Human
CASSSRGWKTQYF

SEQ ID NO: 1899 - protein, 14 aa, Human
CASSTSSRDNEQFF

SEQ ID NO: 1900 - protein, 15 aa, Human
CASSYDRETNEKLFF

SEQ ID NO: 1901 - protein, 14 aa, Human
CASSYYQGGGEQYF

SEQ ID NO: 1902 - protein, 15 aa, Human
CACSFGERGYNGQFF

SEQ ID NO: 1903 - protein, 19 aa, Human
CANPPIVGAVVSGANVLTF

SEQ ID NO: 1904 - protein, 15 aa, Human
CANSFGDRANNEQFF

SEQ ID NO: 1905 - protein, 15 aa, Human
CAPSFGDRAYSDKFF

SEQ ID NO: 1906 - protein, 14 aa, Human
CAREGQGPYNEQFF

SEQ ID NO: 1907 - protein, 13 aa, Human
CARSFASGYEQFF

SEQ ID NO: 1908 - protein, 12 aa, Human
CASEGGPDEQFF

SEQ ID NO: 1909 - protein, 15 aa, Human
CASGTLATSTDTQYF

SEQ ID NO: 1910 - protein, 14 aa, Human
CASHQAGGYTEAFF

SEQ ID NO: 1911 - protein, 15 aa, Human
CASKLAGGTQETQYF

SEQ ID NO: 1912 - protein, 12 aa, Human
CASMVGDTEAFF

SEQ ID NO: 1913 - protein, 15 aa, Human
CASNLGLNPYNEQFF

SEQ ID NO: 1914 - protein, 15 aa, Human
CASPFGDRPYHEQFF

SEQ ID NO: 1915 - protein, 14 aa, Human
CASRDEGLWNEQFF

SEQ ID NO: 1916 - protein, 13 aa, Human
CASRGESYNEQFF

SEQ ID NO: 1917 - protein, 12 aa, Human
CASRIQGYEQYF

SEQ ID NO: 1918 - protein, 15 aa, Human
CASRLGESSYNEQFF

SEQ ID NO: 1919 - protein, 15 aa, Human
CASRLRDFTYNEQFF

SEQ ID NO: 1920 - protein, 15 aa, Human
CASRPLAEIYNEQFF

SEQ ID NO: 1921 - protein, 14 aa, Human
CASRPPRQTDTQYF

SEQ ID NO: 1922 - protein, 13 aa, Human
CASRQGTTNEQFF

SEQ ID NO: 1923 - protein, 14 aa, Human
CASRRRDDTDTQYF

SEQ ID NO: 1924 - protein, 17 aa, Human
CASSAGGFSGRGLEQYF

SEQ ID NO: 1925 - protein, 16 aa, Human
CASSASAGVEADTQYF

SEQ ID NO: 1926 - protein, 14 aa, Human
CASSASGGYNEQFF

SEQ ID NO: 1927 - protein, 18 aa, Human
CASSENSPLAGGRNEQFF

SEQ ID NO: 1928 - protein, 15 aa, Human
CASSFAGSSSYEQYF

SEQ ID NO: 1929 - protein, 14 aa, Human
CASSFDKNSYEQYF

SEQ ID NO: 1930 - protein, 16 aa, Human
CASSFEAGGSYNEQFF

SEQ ID NO: 1931 - protein, 11 aa, Human
CASSFFNEQFF

SEQ ID NO: 1932 - protein, 15 aa, Human
CASSFGASGGYEQYF

SEQ ID NO: 1933 - protein, 15 aa, Human
CASSFGDIGSYEQYF

SEQ ID NO: 1934 - protein, 15 aa, Human
CASSFGDRANNEQFF

SEQ ID NO: 1935 - protein, 15 aa, Human
CASSFGDRAYNEQFF

SEQ ID NO: 1936 - protein, 15 aa, Human
CASSFGDRAYYEQFF

SEQ ID NO: 1937 - protein, 15 aa, Human
CASSFGDRDYNEQFF

SEQ ID NO: 1938 - protein, 15 aa, Human
CASSFGGRAYNEQSF

SEQ ID NO: 1939 - protein, 16 aa, Human
CASSFGTATEGYGYTF

SEQ ID NO: 1940 - protein, 12 aa, Human
CASSFGTEKAFF

SEQ ID NO: 1941 - protein, 15 aa, Human
CASSFGTGALGEQYF

SEQ ID NO: 1942 - protein, 15 aa, Human
CASSFLAGLYNEQFF

SEQ ID NO: 1943 - protein, 15 aa, Human
CASSFLGLRYNEQFF

SEQ ID NO: 1944 - protein, 14 aa, Human
CASSFLGSGETQYF

SEQ ID NO: 1945 - protein, 13 aa, Human
CASSFNSGNTIYF

SEQ ID NO: 1946 - protein, 13 aa, Human
CASSFPGLNEQYF

SEQ ID NO: 1947 - protein, 15 aa, Human
CASSFPGTGGHEQYF

SEQ ID NO: 1948 - protein, 16 aa, Human
CASSFPNHLSSYEQYF

SEQ ID NO: 1949 - protein, 15 aa, Human
CASSFPTGGRDEQFF

SEQ ID NO: 1950 - protein, 15 aa, Human
CASSFRDGTQETQYF

SEQ ID NO: 1951 - protein, 15 aa, Human
CASSFRDRPKETQYF

SEQ ID NO: 1952 - protein, 15 aa, Human
CASSFRDRSSYEQYF

SEQ ID NO: 1953 - protein, 14 aa, Human
CASSFRDTYNEQFF

SEQ ID NO: 1954 - protein, 15 aa, Human
CASSFRGSGNQPQHF

SEQ ID NO: 1955 - protein, 14 aa, Human
CASSFRLSYNEQFF

SEQ ID NO: 1956 - protein, 14 aa, Human
CASSFSGAYNEQFF

SEQ ID NO: 1957 - protein, 14 aa, Human
CASSFSGAYNERFF

SEQ ID NO: 1958 - protein, 17 aa, Human
CASSFSGTSDFYNEQFF

SEQ ID NO: 1959 - protein, 12 aa, Human
CASSFSNTEAFF

SEQ ID NO: 1960 - protein, 20 aa, Human
CASSFSPGGQPLSGANVLTF

SEQ ID NO: 1961 - protein, 15 aa, Human
CASSFTGGDAEKLFF

SEQ ID NO: 1962 - protein, 15 aa, Human
CASSFVGKPYNEQFF

SEQ ID NO: 1963 - protein, 15 aa, Human
CASSGGQGTVYEQYF

SEQ ID NO: 1964 - protein, 12 aa, Human
CASSGGRTESFF

SEQ ID NO: 1965 - protein, 12 aa, Human
CASSGGSYEQYF

SEQ ID NO: 1966 - protein, 14 aa, Human
CASSGTSGRDTQYF

SEQ ID NO: 1967 - protein, 16 aa, Human
CASSHGSDGPQETQYF

SEQ ID NO: 1968 - protein, 14 aa, Human
CASSHGTGSGGYTF

SEQ ID NO: 1969 - protein, 15 aa, Human
CASSIGGSGIETQYF

SEQ ID NO: 1970 - protein, 14 aa, Human
CASSLAGGEETQYF

SEQ ID NO: 1971 - protein, 14 aa, Human
CASSLAGGYNEQFF

SEQ ID NO: 1972 - protein, 14 aa, Human
CASSLAGGYTEAFF

SEQ ID NO: 1973 - protein, 14 aa, Human
CASSLAGGYVEQFF

SEQ ID NO: 1974 - protein, 16 aa, Human
CASSLAGLINTGELFF

SEQ ID NO: 1975 - protein, 14 aa, Human
CASSLAGSDYGYTF

SEQ ID NO: 1976 - protein, 15 aa, Human
CASSLAMRYQETQYF

SEQ ID NO: 1977 - protein, 13 aa, Human
CASSLAPAYEQYF

SEQ ID NO: 1978 - protein, 15 aa, Human
CASSLAPGVGNEQFF

SEQ ID NO: 1979 - protein, 22 aa, Human
CASSLARGWTSGLFPSLNEQFF

SEQ ID NO: 1980 - protein, 14 aa, Human
CASSLASGEETQYF

SEQ ID NO: 1981 - protein, 13 aa, Human
CASSLATDYEQYF

SEQ ID NO: 1982 - protein, 14 aa, Human
CASSLATGSYEQYF

SEQ ID NO: 1983 - protein, 15 aa, Human
CASSLAVGSADTQYF

SEQ ID NO: 1984 - protein, 20 aa, Human
CASSLAYRDRVALTYNEQFF

SEQ ID NO: 1985 - protein, 14 aa, Human
CASSLAYVNYGYSF

SEQ ID NO: 1986 - protein, 14 aa, Human
CASSLAYVNYGYTF

SEQ ID NO: 1987 - protein, 12 aa, Human
CASSLDDSIQYF

SEQ ID NO: 1988 - protein, 16 aa, Human
CASSLDFGITADTQYF

SEQ ID NO: 1989 - protein, 14 aa, Human
CASSLDGGPYEQYF

SEQ ID NO: 1990 - protein, 14 aa, Human
CASSLDGNNQPQHF

SEQ ID NO: 1991 - protein, 15 aa, Human
CASSLDNSGANVLTF

SEQ ID NO: 1992 - protein, 14 aa, Human
CASSLDRAWETQYF

SEQ ID NO: 1993 - protein, 13 aa, Human
CASSLDRGETQYF

SEQ ID NO: 1994 - protein, 13 aa, Human
CASSLDSCNEQFF

SEQ ID NO: 1995 - protein, 13 aa, Human
CASSLDSYNEQFF

SEQ ID NO: 1996 - protein, 18 aa, Human
CASSLEAGGTGYQETQYF

SEQ ID NO: 1997 - protein, 15 aa, Human
CASSLEGAGLNTQYF

SEQ ID NO: 1998 - protein, 15 aa, Human
CASSLEGPGDTEAFF

SEQ ID NO: 1999 - protein, 13 aa, Human
CASSLEGQETQYF

SEQ ID NO: 2000 - protein, 17 aa, Human
CASSLEGSGRAYREQFF

SEQ ID NO: 2001 - protein, 15 aa, Human
CASSLESALTDTQYF

SEQ ID NO: 2002 - protein, 13 aa, Human
CASSLESRDEQYF

SEQ ID NO: 2003 - protein, 14 aa, Human
CASSLFSGSYEQYF

SEQ ID NO: 2004 - protein, 17 aa, Human
CASSLFVREGSYNEQFF

SEQ ID NO: 2005 - protein, 17 aa, Human
CASSLGAGGPFGYEQYF

SEQ ID NO: 2006 - protein, 18 aa, Human
CASSLGAGIQKGYNEQFF

SEQ ID NO: 2007 - protein, 16 aa, Human
CASSLGDGSSTDTQYF

SEQ ID NO: 2008 - protein, 16 aa, Human
CASSLGDRGLGETQYF

SEQ ID NO: 2009 - protein, 15 aa, Human
CASSLGDRDNYDEFF

SEQ ID NO: 2010 - protein, 17 aa, Human
CASSLGGPSGSSGELFF

SEQ ID NO: 2011 - protein, 16 aa, Human
CASSLGGQGLNTEAFF

SEQ ID NO: 2012 - protein, 16 aa, Human
CASSLGIGGSYNEQFF

SEQ ID NO: 2013 - protein, 15 aa, Human
CASSLGPDWHTGELF

SEQ ID NO: 2014 - protein, 16 aa, Human
CASSLGPDRGVNEQFF

SEQ ID NO: 2015 - protein, 14 aa, Human
CASSLGPTLHGYTF

SEQ ID NO: 2016 - protein, 15 aa, Human
CASSLGQGSGNTIYF

SEQ ID NO: 2017 - protein, 14 aa, Human
CASSLGRGYEKLFF

SEQ ID NO: 2018 - protein, 17 aa, Human
CASSLGRLSHGADTQYF

SEQ ID NO: 2019 - protein, 16 aa, Human
CASSLGSAFSGNTIYF

SEQ ID NO: 2020 - protein, 16 aa, Human
CASSLGSGGFGTEAFF

SEQ ID NO: 2021 - protein, 20 aa, Human
CASSLGSGGNPSSGANVLTF

SEQ ID NO: 2022 - protein, 16 aa, Human
CASSLGSGGPYTEAFF

SEQ ID NO: 2023 - protein, 18 aa, Human
CASSLGSRPRLNTGELFF

SEQ ID NO: 2024 - protein, 16 aa, Human
CASSLGTGGLYTEAFF

SEQ ID NO: 2025 - protein, 14 aa, Human
CASSLGTGGYGYTF

SEQ ID NO: 2026 - protein, 15 aa, Human
CASSLGTGRADTQYF

SEQ ID NO: 2027 - protein, 15 aa, Human
CASSLGTGRDDEQFF

SEQ ID NO: 2028 - protein, 15 aa, Human
CASSLGTTELAGEFF

SEQ ID NO: 2029 - protein, 14 aa, Human
CASSLGTWNYEQYF

SEQ ID NO: 2030 - protein, 16 aa, Human
CASSLGVAGGLNEQYF

SEQ ID NO: 2031 - protein, 15 aa, Human
CASSLGVSGLKTQYF

SEQ ID NO: 2032 - protein, 14 aa, Human
CASSLGVSGSEQYF

SEQ ID NO: 2033 - protein, 14 aa, Human
CASSLGVSYTEAFF

SEQ ID NO: 2034 - protein, 16 aa, Human
CASSLGWRETYDEHFF

SEQ ID NO: 2035 - protein, 16 aa, Human
CASSLGWRETYDEQFF

SEQ ID NO: 2036 - protein, 16 aa, Human
CASSLGWRETYNEQFF

SEQ ID NO: 2037 - protein, 18 aa, Human
CASSLIPVGVTSYHEQFF

SEQ ID NO: 2038 - protein, 15 aa, Human
CASSLLAGGNYGYTF

SEQ ID NO: 2039 - protein, 15 aa, Human
CASSLLGGLGTEAFF

SEQ ID NO: 2040 - protein, 16 aa, Human
CASSLLGSAKYNEQFF

SEQ ID NO: 2041 - protein, 15 aa, Human
CASSLLKEKADTQYF

SEQ ID NO: 2042 - protein, 15 aa, Human
CASSLLREHQDTQYF

SEQ ID NO: 2043 - protein, 15 aa, Human
CASSLLREHRDTQYF

SEQ ID NO: 2044 - protein, 15 aa, Human
CASSLLREKADTQYF

SEQ ID NO: 2045 - protein, 15 aa, Human
CASSLLRESTDTQYF

SEQ ID NO: 2046 - protein, 15 aa, Human
CASSLLSGGGETQYF

SEQ ID NO: 2047 - protein, 14 aa, Human
CASSLMEGSYGYTF

SEQ ID NO: 2048 - protein, 15 aa, Human
CASSLNALAVNEQFF

SEQ ID NO: 2049 - protein, 13 aa, Human
CASSLNEEETQYF

SEQ ID NO: 2050 - protein, 18 aa, Human
CASSLRAGWEEDTDTQYF

SEQ ID NO: 2051 - protein, 15 aa, Human
CASSLRAGGLDEQYF

SEQ ID NO: 2052 - protein, 16 aa, Human
CASSLRLYSHNTEAFF

SEQ ID NO: 2053 - protein, 13 aa, Human
CASSLRQSPEQYF

SEQ ID NO: 2054 - protein, 11 aa, Human
CASSLRREQFF

SEQ ID NO: 2055 - protein, 14 aa, Human
CASSLSGGYNEQFF

SEQ ID NO: 2056 - protein, 16 aa, Human
CASSLSGLAGVREQFF

SEQ ID NO: 2057 - protein, 16 aa, Human
CASSLSGRKVSYEQYF

SEQ ID NO: 2058 - protein, 12 aa, Human
CASSLSRGRAFF

SEQ ID NO: 2059 - protein, 16 aa, Human
CASSLSSDISQETQYF

SEQ ID NO: 2060 - protein, 12 aa, Human
CASSLTAYEQYF

SEQ ID NO: 2061 - protein, 15 aa, Human
CASSLTGGSYNEQFF

SEQ ID NO: 2062 - protein, 13 aa, Human
CASSLVGEREQFF

SEQ ID NO: 2063 - protein, 15 aa, Human
CASSLVGGRFETQYF

SEQ ID NO: 2064 - protein, 13 aa, Human
CASSLVGIETQYF

SEQ ID NO: 2065 - protein, 11 aa, Human
CASSLVLEQFF

SEQ ID NO: 2066 - protein, 15 aa, Human
CASSLWDGGEETQYF

SEQ ID NO: 2067 - protein, 16 aa, Human
CASSLWTRIYQETQYF

SEQ ID NO: 2068 - protein, 16 aa, Human
CASSLYLGVRGHEQFF

SEQ ID NO: 2069 - protein, 16 aa, Human
CASSLYPLSSYNEQFF

SEQ ID NO: 2070 - protein, 15 aa, Human
CASSMFLVGAETQYF

SEQ ID NO: 2071 - protein, 12 aa, Human
CASSNDFTEAFF

SEQ ID NO: 2072 - protein, 12 aa, Human
CASSPADYEQYF

SEQ ID NO: 2073 - protein, 15 aa, Human
CASSPAGLADYEQYF

SEQ ID NO: 2074 - protein, 14 aa, Human
CASSPDARDDEQFF

SEQ ID NO: 2075 - protein, 13 aa, Human
CASSPFYNTEAFF

SEQ ID NO: 2076 - protein, 15 aa, Human
CASSPGQGLVNEQFF

SEQ ID NO: 2077 - protein, 15 aa, Human
CASSPGRENTGELFF

SEQ ID NO: 2078 - protein, 14 aa, Human
CASSPGTGVAEQYF

SEQ ID NO: 2079 - protein, 14 aa, Human
CASSPGWGAYEQYF

SEQ ID NO: 2080 - protein, 16 aa, Human
CASSPLVGGTYNEQFF

SEQ ID NO: 2081 - protein, 15 aa, Human
CASSPPTGRAGELFF

SEQ ID NO: 2082 - protein, 14 aa, Human
CASSPSGGYNEQFF

SEQ ID NO: 2083 - protein, 15 aa, Human
CASSPVSPTRETQYF

SEQ ID NO: 2084 - protein, 16 aa, Human
CASSPWGGGRAGELFF

SEQ ID NO: 2085 - protein, 14 aa, Human
CASSPWTSGRAGFF

SEQ ID NO: 2086 - protein, 15 aa, Human
CASSQGHRSYNEQFF

SEQ ID NO: 2087 - protein, 16 aa, Human
CASSQGLAGPYNEQFF

SEQ ID NO: 2088 - protein, 14 aa, Human
CASSRIGGSDTQYF

SEQ ID NO: 2089 - protein, 19 aa, Human
CASSRIPLTSGRADWEQYF

SEQ ID NO: 2090 - protein, 15 aa, Human
CASSRMGQGRTEAFF

SEQ ID NO: 2091 - protein, 15 aa, Human
CASSRRGADRNEQFF

SEQ ID NO: 2092 - protein, 14 aa, Human
CASSSAGGYNEQFF

SEQ ID NO: 2093 - protein, 16 aa, Human
CASSSEGLSGANVLTF

SEQ ID NO: 2094 - protein, 14 aa, Human
CASSSGQGTYEQYF

SEQ ID NO: 2095 - protein, 16 aa, Human
CASSSGTDFSTDTQYF

SEQ ID NO: 2096 - protein, 15 aa, Human
CASSSIAGAGNEQFF

SEQ ID NO: 2097 - protein, 12 aa, Human
CASSSISETQYF

SEQ ID NO: 2098 - protein, 17 aa, Human
CASSSIVSRPSTDTQYF

SEQ ID NO: 2099 - protein, 17 aa, Human
CASSSLLAGIDTGELFF

SEQ ID NO: 2100 - protein, 15 aa, Human
CASSSPGQGTYEQYF

SEQ ID NO: 2101 - protein, 13 aa, Human
CASSSPPSNEQFF

SEQ ID NO: 2102 - protein, 16 aa, Human
CASSSPTSGTSYEQYF

SEQ ID NO: 2103 - protein, 15 aa, Human
CASSSQREGLYEQYF

SEQ ID NO: 2104 - protein, 13 aa, Human
CASSSSEAYEQYF

SEQ ID NO: 2105 - protein, 14 aa, Human
CASSSSGAYNEQFF

SEQ ID NO: 2106 - protein, 16 aa, Human
CASSSSKRILNTEAFF

SEQ ID NO: 2107 - protein, 15 aa, Human
CASSSTSGSPDTQYF

SEQ ID NO: 2108 - protein, 16 aa, Human
CASSSTSVSSYNEQFF

SEQ ID NO: 2109 - protein, 13 aa, Human
CASSTRTEETQYF

SEQ ID NO: 2110 - protein, 14 aa, Human
CASSTSGAYNEQFF

SEQ ID NO: 2111 - protein, 16 aa, Human
CASSTTSGRNTGELFF

SEQ ID NO: 2112 - protein, 14 aa, Human
CASSVAGSTDTQYF

SEQ ID NO: 2113 - protein, 11 aa, Human
CASSVGEEQYF

SEQ ID NO: 2114 - protein, 15 aa, Human
CASSWAGTGGYGYTF

SEQ ID NO: 2115 - protein, 13 aa, Human
CASSWDRVYEQFF

SEQ ID NO: 2116 - protein, 17 aa, Human
CASSWGGAYSSQETQYF

SEQ ID NO: 2117 - protein, 16 aa, Human
CASSWGGRETYNEQFF

SEQ ID NO: 2118 - protein, 14 aa, Human
CASSWGTGAGEQFF

SEQ ID NO: 2119 - protein, 14 aa, Human
CASSWGTGSGDQFF

SEQ ID NO: 2120 - protein, 14 aa, Human
CASSWGTGSGEQFF

SEQ ID NO: 2121 - protein, 16 aa, Human
CASSWKGRRRTDTQYF

SEQ ID NO: 2122 - protein, 14 aa, Human
CASSWSAANYGYTF

SEQ ID NO: 2123 - protein, 13 aa, Human
CASSYGGFYEQYF

SEQ ID NO: 2124 - protein, 13 aa, Human
CASSYGTATEAFF

SEQ ID NO: 2125 - protein, 14 aa, Human
CASSYGTGSTEAFF

SEQ ID NO: 2126 - protein, 12 aa, Human
CASSYLNQPQHF

SEQ ID NO: 2127 - protein, 15 aa, Human
CASTKTGLKGETQYF

SEQ ID NO: 2128 - protein, 14 aa, Human
CASTLAGAYNEQFF

SEQ ID NO: 2129 - protein, 14 aa, Human
CASTPGGGYNEQFF

SEQ ID NO: 2130 - protein, 14 aa, Human
CASTPRGSLGELFF

SEQ ID NO: 2131 - protein, 15 aa, Human
CATSFGDRAYNDQFF

SEQ ID NO: 2132 - protein, 15 aa, Human
CATSFGDRAYNEQFF

SEQ ID NO: 2133 - protein, 14 aa, Human
CAVRTEGAINEQFF

SEQ ID NO: 2134 - protein, 13 aa, Human
CAGSGTENTEAFF

SEQ ID NO: 2135 - protein, 12 aa, Human
CAIRGDTYEQYF

SEQ ID NO: 2136 - protein, 14 aa, Human
CAISSQGLENEQYF

SEQ ID NO: 2137 - protein, 14 aa, Human
CASAIAGGINEQFF

SEQ ID NO: 2138 - protein, 17 aa, Human
CASAKRVGLADYNEQFF

SEQ ID NO: 2139 - protein, 15 aa, Human
CASASGGDSSYEQYF

SEQ ID NO: 2140 - protein, 7 aa, Human
CASEAFF

SEQ ID NO: 2141 - protein, 12 aa, Human
CASEAVNEKLFF

SEQ ID NO: 2142 - protein, 12 aa, Human
CASGAGLMTQYF

SEQ ID NO: 2143 - protein, 12 aa, Human
CASGDRANEQYF

SEQ ID NO: 2144 - protein, 13 aa, Human
CASGGTGGYGYTF

SEQ ID NO: 2145 - protein, 16 aa, Human
CASGSPGTSGGNEQFF

SEQ ID NO: 2146 - protein, 15 aa, Human
CASIDRTGPGETQYF

SEQ ID NO: 2147 - protein, 15 aa, Human
CASIGLAGGIDTQYF

SEQ ID NO: 2148 - protein, 13 aa, Human
CASKGPGAEAHYF

SEQ ID NO: 2149 - protein, 13 aa, Human
CASKGPGAEAQYF

SEQ ID NO: 2150 - protein, 15 aa, Human
CASKLGQVPGQPQHF

SEQ ID NO: 2151 - protein, 14 aa, Human
CASKLTTATYEQYF

SEQ ID NO: 2152 - protein, 15 aa, Human
CASKSYRGNTGELFF

SEQ ID NO: 2153 - protein, 14 aa, Human
CASKYRGPTYEQYF

SEQ ID NO: 2154 - protein, 13 aa, Human
CASLQGNTYEQYF

SEQ ID NO: 2155 - protein, 14 aa, Human
CASLSYRDYGELFF

SEQ ID NO: 2156 - protein, 16 aa, Human
CASMSGPLSYTGELFF

SEQ ID NO: 2157 - protein, 16 aa, Human
CASMSGPMTYTFELCF

SEQ ID NO: 2158 - protein, 15 aa, Human
CASNPLGGGVETQYF

SEQ ID NO: 2159 - protein, 14 aa, Human
CASRATGGRQPQHF

SEQ ID NO: 2160 - protein, 15 aa, Human
CASREGGQPLDTQYF

SEQ ID NO: 2161 - protein, 12 aa, Human
CASRGGIYGYTF

SEQ ID NO: 2162 - protein, 10 aa, Human
CASRLETQYF

SEQ ID NO: 2163 - protein, 14 aa, Human
CASRLLAGYNDQFF

SEQ ID NO: 2164 - protein, 13 aa, Human
CASRPDERDTQYF

SEQ ID NO: 2165 - protein, 14 aa, Human
CASRPGAPLNIQYF

SEQ ID NO: 2166 - protein, 17 aa, Human
CASRQALAGGLTDEQFF

SEQ ID NO: 2167 - protein, 13 aa, Human
CASRRDPYNEQFF

SEQ ID NO: 2168 - protein, 14 aa, Human
CASRRIEGTGELFF

SEQ ID NO: 2169 - protein, 13 aa, Human
CASRSRASYEQYF

SEQ ID NO: 2170 - protein, 16 aa, Human
CASRSTSGSSYNEQFF

SEQ ID NO: 2171 - protein, 15 aa, Human
CASRTLGTGSDTQYF

SEQ ID NO: 2172 - protein, 16 aa, Human
CASRVKRGLAEDTQYF

SEQ ID NO: 2173 - protein, 14 aa, Human
CASRVNRAEYGYTF

SEQ ID NO: 2174 - protein, 13 aa, Human
CASSADREYEQYF

SEQ ID NO: 2175 - protein, 14 aa, Human
CASSALERYNEQFF

SEQ ID NO: 2176 - protein, 11 aa, Human
CASSARDEQYF

SEQ ID NO: 2177 - protein, 14 aa, Human
CASSARDGAYEQYF

SEQ ID NO: 2178 - protein, 14 aa, Human
CASSCTGLRDTQYF

SEQ ID NO: 2179 - protein, 14 aa, Human
CASSDAESADQHYF

SEQ ID NO: 2180 - protein, 14 aa, Human
CASSDEDSADQHYF

SEQ ID NO: 2181 - protein, 14 aa, Human
CASSDEESADQQYF

SEQ ID NO: 2182 - protein, 15 aa, Human
CASSDFGGGANVLTF

SEQ ID NO: 2183 - protein, 14 aa, Human
CASSDGDRTYHQYF

SEQ ID NO: 2184 - protein, 16 aa, Human
CASSDGGWGSYNEQFF

SEQ ID NO: 2185 - protein, 12 aa, Human
CASSDLFEKLFF

SEQ ID NO: 2186 - protein, 15 aa, Human
CASSDPPAGFDIQYF

SEQ ID NO: 2187 - protein, 17 aa, Human
CASSDRGPISGANVLTF

SEQ ID NO: 2188 - protein, 12 aa, Human
CASSDSANEQFF

SEQ ID NO: 2189 - protein, 15 aa, Human
CASSDSSPNTGELFF

SEQ ID NO: 2190 - protein, 13 aa, Human
CASSDTENTEDFF

SEQ ID NO: 2191 - protein, 15 aa, Human
CASSEAEGASYEQYF

SEQ ID NO: 2192 - protein, 17 aa, Human
CASSEAFGGALGQPQHF

SEQ ID NO: 2193 - protein, 12 aa, Human
CASSEAGVELFF

SEQ ID NO: 2194 - protein, 16 aa, Human
CASSEAQGGPTDTQYF

SEQ ID NO: 2195 - protein, 16 aa, Human
CASSEAQGGRTDTQFF

SEQ ID NO: 2196 - protein, 17 aa, Human
CASSEARDRLAVYGYTF

SEQ ID NO: 2197 - protein, 15 aa, Human
CASSEASGSSYEQYF

SEQ ID NO: 2198 - protein, 16 aa, Human
CASSEDPPGLAAEQYF

SEQ ID NO: 2199 - protein, 17 aa, Human
CASSEDSLAGQNNEQFF

SEQ ID NO: 2200 - protein, 16 aa, Human
CASSEDTGTGSYEQYF

SEQ ID NO: 2201 - protein, 16 aa, Human
CASSEERDRGQDEYYF

SEQ ID NO: 2202 - protein, 16 aa, Human
CASSEEVNPGANVLTF

SEQ ID NO: 2203 - protein, 16 aa, Human
CASSEFSSGGKHGYTF

SEQ ID NO: 2204 - protein, 16 aa, Human
CASSEGDSSGANVLTF

SEQ ID NO: 2205 - protein, 14 aa, Human
CASSEGDSPYEQYF

SEQ ID NO: 2206 - protein, 20 aa, Human
CASSEGGASQVSGVKNIQYF

SEQ ID NO: 2207 - protein, 15 aa, Human
CASSEGQVSQETQYF

SEQ ID NO: 2208 - protein, 15 aa, Human
CASSELAGDTDTQYF

SEQ ID NO: 2209 - protein, 16 aa, Human
CASSELAGGPQETQYF

SEQ ID NO: 2210 - protein, 17 aa, Human
CASSELGRFSGANVLTF

SEQ ID NO: 2211 - protein, 15 aa, Human
CASSERAGGSETQYF

SEQ ID NO: 2212 - protein, 14 aa, Human
CASSERGPNQPQHF

SEQ ID NO: 2213 - protein, 15 aa, Human
CASSERTGGNTEAFF

SEQ ID NO: 2214 - protein, 13 aa, Human
CASSETDNTEAFF

SEQ ID NO: 2215 - protein, 14 aa, Human
CASSETDRGHEQYF

SEQ ID NO: 2216 - protein, 14 aa, Human
CASSETGGYGEQYF

SEQ ID NO: 2217 - protein, 13 aa, Human
CASSETISYEQYF

SEQ ID NO: 2218 - protein, 14 aa, Human
CASSETSGRETDFF

SEQ ID NO: 2219 - protein, 15 aa, Human
CASSEVSGSGNTIYF

SEQ ID NO: 2220 - protein, 15 aa, Human
CASSFLTDFQETQYF

SEQ ID NO: 2221 - protein, 14 aa, Human
CASSFPGVVETQYF

SEQ ID NO: 2222 - protein, 15 aa, Human
CASSGEREGRYEQYF

SEQ ID NO: 2223 - protein, 14 aa, Human
CASSGLADYNEQFF

SEQ ID NO: 2224 - protein, 14 aa, Human
CASSGQPMNTEAFF

SEQ ID NO: 2225 - protein, 15 aa, Human
CASSGRDTAAYEQYF

SEQ ID NO: 2226 - protein, 13 aa, Human
CASSGTENTEAFF

SEQ ID NO: 2227 - protein, 15 aa, Human
CASSHAHEGADTQYF

SEQ ID NO: 2228 - protein, 15 aa, Human
CASSHLGDGTDTQYF

SEQ ID NO: 2229 - protein, 13 aa, Human
CASSHNPNYGYTF

SEQ ID NO: 2230 - protein, 17 aa, Human
CASSHRGRGDPHTFGFF

SEQ ID NO: 2231 - protein, 14 aa, Human
CASSHSRSGDHLSF

SEQ ID NO: 2232 - protein, 14 aa, Human
CASSIDSQAGELFF

SEQ ID NO: 2233 - protein, 15 aa, Human
CASSISGSHSYEQYF

SEQ ID NO: 2234 - protein, 14 aa, Human
CASSISRIGDNLYF

SEQ ID NO: 2235 - protein, 14 aa, Human
CASSISRTGDNLYF

SEQ ID NO: 2236 - protein, 15 aa, Human
CASSKGAGAAYGYTF

SEQ ID NO: 2237 - protein, 15 aa, Human
CASSKYPGGRNTIYF

SEQ ID NO: 2238 - protein, 13 aa, Human
CASSLAGVYEQYF

SEQ ID NO: 2239 - protein, 15 aa, Human
CASSLGLAGNNEQFF

SEQ ID NO: 2240 - protein, 14 aa, Human
CASSLGQGANTIYF

SEQ ID NO: 2241 - protein, 14 aa, Human
CASSLGQHQETQYF

SEQ ID NO: 2242 - protein, 14 aa, Human
CASSLGTPRDEQFF

SEQ ID NO: 2243 - protein, 16 aa, Human
CASSLIRQGWGYGYTF

SEQ ID NO: 2244 - protein, 15 aa, Human
CASSLLAGENDEQYF

SEQ ID NO: 2245 - protein, 10 aa, Human
CASSLRTQHF

SEQ ID NO: 2246 - protein, 14 aa, Human
CASSLSGTGDNLSF

SEQ ID NO: 2247 - protein, 13 aa, Human
CASSLSSYNEQFF

SEQ ID NO: 2248 - protein, 14 aa, Human
CASSNRGPNQPQHF

SEQ ID NO: 2249 - protein, 14 aa, Human
CASSPAGEGYEQYF

SEQ ID NO: 2250 - protein, 13 aa, Human
CASSPDRAETQYF

SEQ ID NO: 2251 - protein, 16 aa, Human
CASSPESVRGGNTIYF

SEQ ID NO: 2252 - protein, 12 aa, Human
CASSPGANVLTF

SEQ ID NO: 2253 - protein, 14 aa, Human
CASSPGGGDDYQYF

SEQ ID NO: 2254 - protein, 12 aa, Human
CASSPGGGKLFF

SEQ ID NO: 2255 - protein, 14 aa, Human
CASSPGGGNDHQYF

SEQ ID NO: 2256 - protein, 14 aa, Human
CASSPGGGNYQQYF

SEQ ID NO: 2257 - protein, 15 aa, Human
CASSPGPGPGNEQFF

SEQ ID NO: 2258 - protein, 15 aa, Human
CASSPGQGGINEQFF

SEQ ID NO: 2259 - protein, 14 aa, Human
CASSPGQGNYEQYF

SEQ ID NO: 2260 - protein, 14 aa, Human
CASSPGQGNYKQYF

SEQ ID NO: 2261 - protein, 15 aa, Human
CASSPGTGIYNEQFF

SEQ ID NO: 2262 - protein, 16 aa, Human
CASSPIAGGPGDTQYF

SEQ ID NO: 2263 - protein, 16 aa, Human
CASSPINRGHQETQYF

SEQ ID NO: 2264 - protein, 16 aa, Human
CASSPKAAGINEKLFF

SEQ ID NO: 2265 - protein, 15 aa, Human
CASSPLAEPTDTQYF

SEQ ID NO: 2266 - protein, 16 aa, Human
CASSPLSGRHADTQYF

SEQ ID NO: 2267 - protein, 15 aa, Human
CASSPPGPKIDTQYF

SEQ ID NO: 2268 - protein, 14 aa, Human
CASSPSGLLAPQHF

SEQ ID NO: 2269 - protein, 15 aa, Human
CASSPSTGSLGEQYF

SEQ ID NO: 2270 - protein, 15 aa, Human
CASSPTGTGAGEQYF

SEQ ID NO: 2271 - protein, 16 aa, Human
CASSQGQGRLTDTQYF

SEQ ID NO: 2272 - protein, 15 aa, Human
CASSQKPGPWEVETF

SEQ ID NO: 2273 - protein, 15 aa, Human
CASSRLEGLYNEQFF

SEQ ID NO: 2274 - protein, 13 aa, Human
CASSRTSIHEQFF

SEQ ID NO: 2275 - protein, 12 aa, Human
CASSRTSVRALF

SEQ ID NO: 2276 - protein, 11 aa, Human
CASSSAWEQYF

SEQ ID NO: 2277 - protein, 14 aa, Human
CASSSERARCQQYF

SEQ ID NO: 2278 - protein, 13 aa, Human
CASSSGATYEQYF

SEQ ID NO: 2279 - protein, 13 aa, Human
CASSSGGTYEQYF

SEQ ID NO: 2280 - protein, 14 aa, Human
CASSSGHMNTEAFF

SEQ ID NO: 2281 - protein, 14 aa, Human
CASSSGLGFNEQFF

SEQ ID NO: 2282 - protein, 16 aa, Human
CASSSGQGGSYNDQFF

SEQ ID NO: 2283 - protein, 15 aa, Human
CASSSGTGAGETQYF

SEQ ID NO: 2284 - protein, 17 aa, Human
CASSSGTSGDFYNEQFF

SEQ ID NO: 2285 - protein, 14 aa, Human
CASSSLPLADTQYF

SEQ ID NO: 2286 - protein, 19 aa, Human
CASSSLSGTSGKTGYEQYF

SEQ ID NO: 2287 - protein, 14 aa, Human
CASSSSVNGNTIYF

SEQ ID NO: 2288 - protein, 13 aa, Human
CASSSTGDTEAFF

SEQ ID NO: 2289 - protein, 13 aa, Human
CASSTGFRDTQYF

SEQ ID NO: 2290 - protein, 13 aa, Human
CASSTTGGKGYTF

SEQ ID NO: 2291 - protein, 17 aa, Human
CASSVKGLVREYNEQFF

SEQ ID NO: 2292 - protein, 14 aa, Human
CASSVPGLAGEQFF

SEQ ID NO: 2293 - protein, 14 aa, Human
CASSVQNSYNEQFF

SEQ ID NO: 2294 - protein, 13 aa, Human
CASSVRENTEAFF

SEQ ID NO: 2295 - protein, 14 aa, Human
CASSWAGTTNEQFF

SEQ ID NO: 2296 - protein, 13 aa, Human
CASSWGMGETQYF

SEQ ID NO: 2297 - protein, 14 aa, Human
CASSWRTSGYEQYF

SEQ ID NO: 2298 - protein, 14 aa, Human
CASSWTGLTDTQYF

SEQ ID NO: 2299 - protein, 15 aa, Human
CASSYADREVQPQHF

SEQ ID NO: 2300 - protein, 16 aa, Human
CASSYADTFSYNEQFF

SEQ ID NO: 2301 - protein, 12 aa, Human
CASSYAGAEQFF

SEQ ID NO: 2302 - protein, 15 aa, Human
CASSYATGEGSPLHF

SEQ ID NO: 2303 - protein, 17 aa, Human
CASSYAYRETTNEKLFF

SEQ ID NO: 2304 - protein, 14 aa, Human
CASSYFEMEETQYF

SEQ ID NO: 2305 - protein, 13 aa, Human
CASSYFLNTEAFF

SEQ ID NO: 2306 - protein, 18 aa, Human
CASSYFSPGLAGEETQYF

SEQ ID NO: 2307 - protein, 14 aa, Human
CASSYGAGGYEQYF

SEQ ID NO: 2308 - protein, 16 aa, Human
CASSYGAPPQYNEQFF

SEQ ID NO: 2309 - protein, 15 aa, Human
CASSYGASGSDTYYF

SEQ ID NO: 2310 - protein, 14 aa, Human
CASSYGDYSYEQYF

SEQ ID NO: 2311 - protein, 14 aa, Human
CASSYGDYSYQQYF

SEQ ID NO: 2312 - protein, 16 aa, Human
CASSYGLAVNTGELFF

SEQ ID NO: 2313 - protein, 15 aa, Human
CASSYGQTINYGYTF

SEQ ID NO: 2314 - protein, 16 aa, Human
CASSYGRAREPLWWYF

SEQ ID NO: 2315 - protein, 14 aa, Human
CASSYGRSNYGYTF

SEQ ID NO: 2316 - protein, 13 aa, Human
CASSYGRVNEQFF

SEQ ID NO: 2317 - protein, 13 aa, Human
CASSYGSTYEQYF

SEQ ID NO: 2318 - protein, 16 aa, Human
CASSYGTGEVTGELFF

SEQ ID NO: 2319 - protein, 16 aa, Human
CASSYGTGTIHSPLHF

SEQ ID NO: 2320 - protein, 15 aa, Human
CASSYGTSASHTHFF

SEQ ID NO: 2321 - protein, 15 aa, Human
CASSYGTSGSDTQYF

SEQ ID NO: 2322 - protein, 12 aa, Human
CASSYGVYEQYF

SEQ ID NO: 2323 - protein, 13 aa, Human
CASSYIQNSPLHF

SEQ ID NO: 2324 - protein, 15 aa, Human
CASSYLAGNTDTQYF

SEQ ID NO: 2325 - protein, 15 aa, Human
CASSYLGGSNTEAFF

SEQ ID NO: 2326 - protein, 13 aa, Human
CASSYLGQGEQYF

SEQ ID NO: 2327 - protein, 18 aa, Human
CASSYLTLAGGPQETQYF

SEQ ID NO: 2328 - protein, 17 aa, Human
CASSYNPTSGAKNIQYF

SEQ ID NO: 2329 - protein, 17 aa, Human
CASSYPGQGAHTGELFF

SEQ ID NO: 2330 - protein, 14 aa, Human
CASSYQDRGYEQYF

SEQ ID NO: 2331 - protein, 16 aa, Human
CASSYQGWGPNQPQHF

SEQ ID NO: 2332 - protein, 11 aa, Human
CASSYRDEQFF

SEQ ID NO: 2333 - protein, 14 aa, Human
CASSYRDLPYQQYF

SEQ ID NO: 2334 - protein, 15 aa, Human
CASSYRDSYYNEQFF

SEQ ID NO: 2335 - protein, 14 aa, Human
CASSYRDVAYEQYF

SEQ ID NO: 2336 - protein, 14 aa, Human
CASSYRDVPYEQYF

SEQ ID NO: 2337 - protein, 14 aa, Human
CASSYRDVPYQQYF

SEQ ID NO: 2338 - protein, 14 aa, Human
CASSYRGQGNEQYF

SEQ ID NO: 2339 - protein, 15 aa, Human
CASSYRGRVLDEQYF

SEQ ID NO: 2340 - protein, 15 aa, Human
CASSYRQDSNQPQHF

SEQ ID NO: 2341 - protein, 14 aa, Human
CASSYRQGTYEQYF

SEQ ID NO: 2342 - protein, 17 aa, Human
CASSYRQYTSDGYEQYF

SEQ ID NO: 2343 - protein, 14 aa, Human
CASSYRWGVDTQYF

SEQ ID NO: 2344 - protein, 12 aa, Human
CASSYSAGEQFF

SEQ ID NO: 2345 - protein, 12 aa, Human
CASSYSDETQYF

SEQ ID NO: 2346 - protein, 16 aa, Human
CASSYSGDSQVSPLHF

SEQ ID NO: 2347 - protein, 18 aa, Human
CASSYSGGEREGRDEQFF

SEQ ID NO: 2348 - protein, 15 aa, Human
CASSYSGGNGNTIYF

SEQ ID NO: 2349 - protein, 14 aa, Human
CASSYSGPLYEQYF

SEQ ID NO: 2350 - protein, 14 aa, Human
CASSYSGRGYDYSF

SEQ ID NO: 2351 - protein, 16 aa, Human
CASSYSGRRPLDEQYF

SEQ ID NO: 2352 - protein, 17 aa, Human
CASSYSKAGGRGNTIYF

SEQ ID NO: 2353 - protein, 15 aa, Human
CASSYSLGGSTEAFF

SEQ ID NO: 2354 - protein, 14 aa, Human
CASSYSPDTDTQYF

SEQ ID NO: 2355 - protein, 16 aa, Human
CASSYSPTSGPWEQYF

SEQ ID NO: 2356 - protein, 14 aa, Human
CASSYSQGENEQFF

SEQ ID NO: 2357 - protein, 15 aa, Human
CASSYSQLANYGYTF

SEQ ID NO: 2358 - protein, 16 aa, Human
CASSYSQRDDPYEQYF

SEQ ID NO: 2359 - protein, 16 aa, Human
CASSYSRDRPSYNEQF

SEQ ID NO: 2360 - protein, 15 aa, Human
CASSYSRENTGELFF

SEQ ID NO: 2361 - protein, 15 aa, Human
CASSYSRQGENIQYF

SEQ ID NO: 2362 - protein, 15 aa, Human
CASSYSRQGGQPQHF

SEQ ID NO: 2363 - protein, 15 aa, Human
CASSYSRVAGFNEQF

SEQ ID NO: 2364 - protein, 13 aa, Human
CASSYSRYNEQFF

SEQ ID NO: 2365 - protein, 13 aa, Human
CASSYSSGTEAFF

SEQ ID NO: 2366 - protein, 16 aa, Human
CASSYSSSDSSYEQYF

SEQ ID NO: 2367 - protein, 18 aa, Human
CASSYSSVPTGLSYGYTF

SEQ ID NO: 2368 - protein, 14 aa, Human
CASSYSTESREQYF

SEQ ID NO: 2369 - protein, 15 aa, Human
CASSYSVGTESPLHF

SEQ ID NO: 2370 - protein, 14 aa, Human
CASSYSVSNQPQHF

SEQ ID NO: 2371 - protein, 18 aa, Human
CASSYTPQSSGRSGEQFF

SEQ ID NO: 2372 - protein, 13 aa, Human
CASSYVGGTEAFF

SEQ ID NO: 2373 - protein, 14 aa, Human
CASSYVTTKETQYF

SEQ ID NO: 2374 - protein, 14 aa, Human
CASSYWEGAYEQYF

SEQ ID NO: 2375 - protein, 15 aa, Human
CASSYYGRETGELFF

SEQ ID NO: 2376 - protein, 13 aa, Human
CASTAGTYNEQFF

SEQ ID NO: 2377 - protein, 15 aa, Human
CASTDFYGGRHGYTF

SEQ ID NO: 2378 - protein, 16 aa, Human
CASTDPLTGMNTEAFF

SEQ ID NO: 2379 - protein, 13 aa, Human
CASTEDPREPQHF

SEQ ID NO: 2380 - protein, 17 aa, Human
CASTHRGKGDSDTLGFF

SEQ ID NO: 2381 - protein, 12 aa, Human
CASTLTGYGYTF

SEQ ID NO: 2382 - protein, 16 aa, Human
CASTMLAGVETGELFF

SEQ ID NO: 2383 - protein, 14 aa, Human
CASTPLGTSGEQFF

SEQ ID NO: 2384 - protein, 14 aa, Human
CASTPRERPSEQYF

SEQ ID NO: 2385 - protein, 15 aa, Human
CASTPSGAWQETQYF

SEQ ID NO: 2386 - protein, 12 aa, Human
CASTQGGAELFF

SEQ ID NO: 2387 - protein, 14 aa, Human
CASTRDSSTDTQYF

SEQ ID NO: 2388 - protein, 17 aa, Human
CASTRPGQGASDTEAFF

SEQ ID NO: 2389 - protein, 12 aa, Human
CASTSGLRELFF

SEQ ID NO: 2390 - protein, 13 aa, Human
CASTTGLNTEAFF

SEQ ID NO: 2391 - protein, 14 aa, Human
CASTVGQGAWEQYF

SEQ ID NO: 2392 - protein, 14 aa, Human
CASWDALDPDTQYF

SEQ ID NO: 2393 - protein, 14 aa, Human
CATEGRLVNTEAFF

SEQ ID NO: 2394 - protein, 15 aa, Human
CAISISAGSPDTQYF

SEQ ID NO: 2395 - protein, 16 aa, Human
CAPRNRTGGDLHEQYF

SEQ ID NO: 2396 - protein, 13 aa, Human
CASGRSSYNEQFF

SEQ ID NO: 2397 - protein, 13 aa, Human
CASRFEGGETQYF

SEQ ID NO: 2398 - protein, 14 aa, Human
CASRGQGNTGELFF

SEQ ID NO: 2399 - protein, 13 aa, Human
CASRTGNWETQYF

SEQ ID NO: 2400 - protein, 13 aa, Human
CASSEGAAYEQYF

SEQ ID NO: 2401 - protein, 15 aa, Human
CASSFLAGVLNEQFF

SEQ ID NO: 2402 - protein, 15 aa, Human
CASSFMASSYNEQFF

SEQ ID NO: 2403 - protein, 14 aa, Human
CASSFNGRTGELFF

SEQ ID NO: 2404 - protein, 16 aa, Human
CASSFRQGSDTGELFF

SEQ ID NO: 2405 - protein, 13 aa, Human
CASSGVLVDTQYF

SEQ ID NO: 2406 - protein, 13 aa, Human
CASSHGGSDTQYF

SEQ ID NO: 2407 - protein, 16 aa, Human
CASSHIAGGSYNEQFF

SEQ ID NO: 2408 - protein, 13 aa, Human
CASSLAGGHGYTF

SEQ ID NO: 2409 - protein, 14 aa, Human
CASSLALGGPEQYF

SEQ ID NO: 2410 - protein, 19 aa, Human
CASSLALGLAGGPTDTQYF

SEQ ID NO: 2411 - protein, 17 aa, Human
CASSLASDRAPENEQFF

SEQ ID NO: 2412 - protein, 14 aa, Human
CASSLDGGGGGYTF

SEQ ID NO: 2413 - protein, 15 aa, Human
CASSLDGRDVDTQYF

SEQ ID NO: 2414 - protein, 13 aa, Human
CASSLDPQETQYF

SEQ ID NO: 2415 - protein, 14 aa, Human
CASSLDRNTGELFF

SEQ ID NO: 2416 - protein, 17 aa, Human
CASSLDRWDGSTDTQYF

SEQ ID NO: 2417 - protein, 13 aa, Human
CASSLDWNQPQHF

SEQ ID NO: 2418 - protein, 14 aa, Human
CASSLEDSYNEQFF

SEQ ID NO: 2419 - protein, 15 aa, Human
CASSLELIVEETQYF

SEQ ID NO: 2420 - protein, 15 aa, Human
CASSLELSVEETQYF

SEQ ID NO: 2421 - protein, 15 aa, Human
CASSLEVALDYEQYF

SEQ ID NO: 2422 - protein, 14 aa, Human
CASSLFAGADTQYF

SEQ ID NO: 2423 - protein, 15 aa, Human
CASSLFPSDYNEQFF

SEQ ID NO: 2424 - protein, 13 aa, Human
CASSLGGGEKLFF

SEQ ID NO: 2425 - protein, 12 aa, Human
CASSLGGNEQFF

SEQ ID NO: 2426 - protein, 12 aa, Human
CASSLGGTEAFF

SEQ ID NO: 2427 - protein, 14 aa, Human
CASSLGQGANEQYF

SEQ ID NO: 2428 - protein, 17 aa, Human
CASSLGRETGEVYGYTF

SEQ ID NO: 2429 - protein, 13 aa, Human
CASSLGTSDEQFF

SEQ ID NO: 2430 - protein, 13 aa, Human
CASSLGYVSEQYF

SEQ ID NO: 2431 - protein, 16 aa, Human
CASSLIGVSVYNEQFF

SEQ ID NO: 2432 - protein, 13 aa, Human
CASSLKVLGEAFF

SEQ ID NO: 2433 - protein, 15 aa, Human
CASSLLGGYGNTIYF

SEQ ID NO: 2434 - protein, 18 aa, Human
CASSLMESGLVGRDTQYF

SEQ ID NO: 2435 - protein, 13 aa, Human
CASSLMGGHEQFF

SEQ ID NO: 2436 - protein, 16 aa, Human
CASSLMGGTGNEKLFF

SEQ ID NO: 2437 - protein, 16 aa, Human
CASSLNPGLAEETQYF

SEQ ID NO: 2438 - protein, 18 aa, Human
CASSLNPLARGTDNEQFF

SEQ ID NO: 2439 - protein, 17 aa, Human
CASSLRGWTSDTDTQYF

SEQ ID NO: 2440 - protein, 15 aa, Human
CASSLSAAGANVLTF

SEQ ID NO: 2441 - protein, 15 aa, Human
CASSLSAGSPDTQYF

SEQ ID NO: 2442 - protein, 15 aa, Human
CASSLSSGSIDEQFF

SEQ ID NO: 2443 - protein, 15 aa, Human
CASSLTGGRADTQYF

SEQ ID NO: 2444 - protein, 15 aa, Human
CASSLTGTGVYEQYF

SEQ ID NO: 2445 - protein, 16 aa, Human
CASSLTSGSSYNEQFF

SEQ ID NO: 2446 - protein, 14 aa, Human
CASSLVDGTYEQYF

SEQ ID NO: 2447 - protein, 20 aa, Human
CASSLVPPGLAGVEGYEQYF

SEQ ID NO: 2448 - protein, 14 aa, Human
CASSLVQAQETQYF

SEQ ID NO: 2449 - protein, 18 aa, Human
CASSLWETGKSTTGELFF

SEQ ID NO: 2450 - protein, 18 aa, Human
CASSLYFGGLAGPGELFF

SEQ ID NO: 2451 - protein, 16 aa, Human
CASSMGLAETLYEQYF

SEQ ID NO: 2452 - protein, 16 aa, Human
CASSPDPHRGIHEQYF

SEQ ID NO: 2453 - protein, 12 aa, Human
CASSPDYNEQFF

SEQ ID NO: 2454 - protein, 16 aa, Human
CASSPGTSGRVNEQFF

SEQ ID NO: 2455 - protein, 16 aa, Human
CASSPIGSESGNTIYF

SEQ ID NO: 2456 - protein, 16 aa, Human
CASSPRAGGDINEQFF

SEQ ID NO: 2457 - protein, 14 aa, Human
CASSPRENTGELFF

SEQ ID NO: 2458 - protein, 12 aa, Human
CASSPRGNEQYF

SEQ ID NO: 2459 - protein, 12 aa, Human
CASSPRTSEWFF

SEQ ID NO: 2460 - protein, 13 aa, Human
CASSPRTTGELFF

SEQ ID NO: 2461 - protein, 15 aa, Human
CASSPTGGAGGELFF

SEQ ID NO: 2462 - protein, 16 aa, Human
CASSPYPGQNYNEQFF

SEQ ID NO: 2463 - protein, 15 aa, Human
CASSPYRSNNNEQFF

SEQ ID NO: 2464 - protein, 15 aa, Human
CASSQGPPGANVLTF

SEQ ID NO: 2465 - protein, 14 aa, Human
CASSRDLPSYEQYF

SEQ ID NO: 2466 - protein, 13 aa, Human
CASSRPGTDTQYF

SEQ ID NO: 2467 - protein, 19 aa, Human
CASSRTYTYSGTANYGYTF

SEQ ID NO: 2468 - protein, 15 aa, Human
CASSRWDSSSYEQYF

SEQ ID NO: 2469 - protein, 15 aa, Human
CASSSEAGAQETQYF

SEQ ID NO: 2470 - protein, 13 aa, Human
CASSSEMNTEAFF

SEQ ID NO: 2471 - protein, 14 aa, Human
CASSSEMNTGELFF

SEQ ID NO: 2472 - protein, 18 aa, Human
CASSSGLAGGASSYEQYF

SEQ ID NO: 2473 - protein, 13 aa, Human
CASSSGSYNEQFF

SEQ ID NO: 2474 - protein, 15 aa, Human
CASSSIRLADNEQFF

SEQ ID NO: 2475 - protein, 13 aa, Human
CASSSLLSYGYTF

SEQ ID NO: 2476 - protein, 14 aa, Human
CASSSNWDHYGYTF

SEQ ID NO: 2477 - protein, 16 aa, Human
CASSSSGTGYTGELFF

SEQ ID NO: 2478 - protein, 15 aa, Human
CASSSTSGGSYEQYF

SEQ ID NO: 2479 - protein, 13 aa, Human
CASSSYDADTQYF

SEQ ID NO: 2480 - protein, 15 aa, Human
CASSTGTSDYNEQFF

SEQ ID NO: 2481 - protein, 16 aa, Human
CASSWGGAGGGYEQFF

SEQ ID NO: 2482 - protein, 15 aa, Human
CASSWGLNSGNTIYF

SEQ ID NO: 2483 - protein, 15 aa, Human
CASSYPTGSYNEQFF

SEQ ID NO: 2484 - protein, 16 aa, Human
CASTELTGPRANEQFF

SEQ ID NO: 2485 - protein, 14 aa, Human
CASTLAGGVNEQFF

SEQ ID NO: 2486 - protein, 14 aa, Human
CASSAGTANYGYTF

SEQ ID NO: 2487 - protein, 13 aa, Human
CASSAGVSRGYTF

SEQ ID NO: 2488 - protein, 17 aa, Human
CASSAHQGLDLGDTQYF

SEQ ID NO: 2489 - protein, 16 aa, Human
CASSALTGNPTDTQYF

SEQ ID NO: 2490 - protein, 15 aa, Human
CASSASGTANTEAFF

SEQ ID NO: 2491 - protein, 15 aa, Human
CASSASQGGGTEAFF

SEQ ID NO: 2492 - protein, 15 aa, Human
CASSATGTGGTEAFF

SEQ ID NO: 2493 - protein, 15 aa, Human
CASSATSGDLYEQYF

SEQ ID NO: 2494 - protein, 15 aa, Human
CASSATTGTIYEQYF

SEQ ID NO: 2495 - protein, 14 aa, Human
CASSAYGQGTEAFF

SEQ ID NO: 2496 - protein, 16 aa, Human
CASSAYPEGTGQDQYF

SEQ ID NO: 2497 - protein, 16 aa, Human
CASSDGTSGRGDTQYF

SEQ ID NO: 2498 - protein, 15 aa, Human
CASSEHGAGANVLTF

SEQ ID NO: 2499 - protein, 15 aa, Human
CASSESGTTTDTQYF

SEQ ID NO: 2500 - protein, 15 aa, Human
CASSEWTASTDTQYF

SEQ ID NO: 2501 - protein, 15 aa, Human
CASSEYRGVGEKLFF

SEQ ID NO: 2502 - protein, 17 aa, Human
CASSFGLGGPPAYEHYF

SEQ ID NO: 2503 - protein, 14 aa, Human
CASSGDSGVTELFF

SEQ ID NO: 2504 - protein, 12 aa, Human
CASSGDSYEQYF

SEQ ID NO: 2505 - protein, 14 aa, Human
CASSGEDSSYEQYF

SEQ ID NO: 2506 - protein, 15 aa, Human
CASSGGERGTYEQYF

SEQ ID NO: 2507 - protein, 17 aa, Human
CASSGQGVISGANVLTF

SEQ ID NO: 2508 - protein, 14 aa, Human
CASSGSSGGETQYF

SEQ ID NO: 2509 - protein, 15 aa, Human
CASSLEGVSTDTQYF

SEQ ID NO: 2510 - protein, 15 aa, Human
CASSLGAGQESPLHF

SEQ ID NO: 2511 - protein, 14 aa, Human
CASSLGASTDTQYF

SEQ ID NO: 2512 - protein, 15 aa, Human
CASSLGDGFNQPQHF

SEQ ID NO: 2513 - protein, 17 aa, Human
CASSLGLGGSPAYYQYF

SEQ ID NO: 2514 - protein, 15 aa, Human
CASSLGTNSNQPQHF

SEQ ID NO: 2515 - protein, 15 aa, Human
CASSLQGGSYNEQFF

SEQ ID NO: 2516 - protein, 15 aa, Human
CASSLRGSGVAGELF

SEQ ID NO: 2517 - protein, 14 aa, Human
CASSPGQGSYEQYF

SEQ ID NO: 2518 - protein, 14 aa, Human
CASSPHWSVQPQHF

SEQ ID NO: 2519 - protein, 16 aa, Human
CASSPPAGPSYNEQFF

SEQ ID NO: 2520 - protein, 15 aa, Human
CASSPQASSYNEQFF

SEQ ID NO: 2521 - protein, 15 aa, Human
CASSPTDRADQPQHF

SEQ ID NO: 2522 - protein, 13 aa, Human
CASSRGMNTEAFF

SEQ ID NO: 2523 - protein, 15 aa, Human
CASSRWTAPQETQYF

SEQ ID NO: 2524 - protein, 16 aa, Human
CASSSKAGGSYNEQFF

SEQ ID NO: 2525 - protein, 15 aa, Human
CASSSRGRGQETQYF

SEQ ID NO: 2526 - protein, 14 aa, Human
CASSSSGGGNEQFF

SEQ ID NO: 2527 - protein, 13 aa, Human
CASSVAGSGELFF

SEQ ID NO: 2528 - protein, 14 aa, Human
CASSVAYRGGEAFF

SEQ ID NO: 2529 - protein, 13 aa, Human
CASSVDEGTPYTF

SEQ ID NO: 2530 - protein, 16 aa, Human
CASSVDGGHSSYEQYF

SEQ ID NO: 2531 - protein, 15 aa, Human
CASSVDGNSNQPQHF

SEQ ID NO: 2532 - protein, 15 aa, Human
CASSVDLVGNNEQFF

SEQ ID NO: 2533 - protein, 15 aa, Human
CASSVDSGEYNEQFF

SEQ ID NO: 2534 - protein, 15 aa, Human
CASSVEASGYNEQFF

SEQ ID NO: 2535 - protein, 15 aa, Human
CASSVEGRSTDTQYF

SEQ ID NO: 2536 - protein, 14 aa, Human
CASSVEYRGNEQFF

SEQ ID NO: 2537 - protein, 14 aa, Human
CASSVGAFDGEQFF

SEQ ID NO: 2538 - protein, 15 aa, Human
CASSVGAGAKNIQYF

SEQ ID NO: 2539 - protein, 15 aa, Human
CASSVGAGGPNEQFF

SEQ ID NO: 2540 - protein, 12 aa, Human
CASSVGGETQYF

SEQ ID NO: 2541 - protein, 15 aa, Human
CASSVGGGLDNEQFF

SEQ ID NO: 2542 - protein, 15 aa, Human
CASSVGGRGTDTQYF

SEQ ID NO: 2543 - protein, 15 aa, Human
CASSVGGSAYNEQFF

SEQ ID NO: 2544 - protein, 16 aa, Human
CASSVGHGSGANVLTF

SEQ ID NO: 2545 - protein, 15 aa, Human
CASSVGHLLTGELFF

SEQ ID NO: 2546 - protein, 17 aa, Human
CASSVGLAGPPAYEQYF

SEQ ID NO: 2547 - protein, 17 aa, Human
CASSVGLAGPPAYVQYF

SEQ ID NO: 2548 - protein, 17 aa, Human
CASSVGLPGPPAYEQYF

SEQ ID NO: 2549 - protein, 15 aa, Human
CASSVGNSGKETQYF

SEQ ID NO: 2550 - protein, 15 aa, Human
CASSVGSGTGSPLHF

SEQ ID NO: 2551 - protein, 15 aa, Human
CASSVGTGGMWEQYF

SEQ ID NO: 2552 - protein, 16 aa, Human
CASSVGVEGVNSPLHF

SEQ ID NO: 2553 - protein, 17 aa, Human
CASSVPRLAGGHNEQFF

SEQ ID NO: 2554 - protein, 14 aa, Human
CASSVPYRGGEQFF

SEQ ID NO: 2555 - protein, 14 aa, Human
CASSVQREGGEQYF

SEQ ID NO: 2556 - protein, 14 aa, Human
CASSVRWEGYEQYF

SEQ ID NO: 2557 - protein, 14 aa, Human
CASSVSGAYNEQFF

SEQ ID NO: 2558 - protein, 14 aa, Human
CASSVSGDYNEQFF

SEQ ID NO: 2559 - protein, 14 aa, Human
CASSVSGGNQPQHF

SEQ ID NO: 2560 - protein, 17 aa, Human
CASSVSGTQPDTGELFF

SEQ ID NO: 2561 - protein, 15 aa, Human
CASSVTGTTTDTQYF

SEQ ID NO: 2562 - protein, 15 aa, Human
CASSVTTGGGNTIYF

SEQ ID NO: 2563 - protein, 16 aa, Human
CASSVVPSGMYGEQFF

SEQ ID NO: 2564 - protein, 18 aa, Human
CASSVVTSGRRSYNEQFF

SEQ ID NO: 2565 - protein, 14 aa, Human
CASSVYDGTDTQYF

SEQ ID NO: 2566 - protein, 18 aa, Human
CASTANSEGSYGANVLTF

SEQ ID NO: 2567 - protein, 16 aa, Human
CAISADYSSSYNEQFF

SEQ ID NO: 2568 - protein, 14 aa, Human
CAISESGSSYEQYF

SEQ ID NO: 2569 - protein, 15 aa, Human
CAISESIAGVNEQFF

SEQ ID NO: 2570 - protein, 18 aa, Human
CAISESPGGARNTDTQYF

SEQ ID NO: 2571 - protein, 16 aa, Human
CAISGDVESSYNEQFF

SEQ ID NO: 2572 - protein, 14 aa, Human
CAISGSRQENEQFF

SEQ ID NO: 2573 - protein, 14 aa, Human
CAISSLAGEDTQYF

SEQ ID NO: 2574 - protein, 14 aa, Human
CASSGGLAGYEQYF

SEQ ID NO: 2575 - protein, 13 aa, Human
CATKDGDSYEQYF

SEQ ID NO: 2576 - protein, 14 aa, Human
CATQGGGVNTEAFF

SEQ ID NO: 2577 - protein, 15 aa, Human
CATVSSEGGPGELFF

SEQ ID NO: 2578 - protein, 13 aa, Human
CASNLWPGERQYF

SEQ ID NO: 2579 - protein, 13 aa, Human
CASRILGYNEQFF

SEQ ID NO: 2580 - protein, 12 aa, Human
CASRPGYNEQFF

SEQ ID NO: 2581 - protein, 12 aa, Human
CASSFERTEAFF

SEQ ID NO: 2582 - protein, 14 aa, Human
CASSFGGVYNEQFF

SEQ ID NO: 2583 - protein, 12 aa, Human
CASSFGQYEQYF

SEQ ID NO: 2584 - protein, 12 aa, Human
CASSFRSNEQFF

SEQ ID NO: 2585 - protein, 16 aa, Human
CASSGPRTGITGELFF

SEQ ID NO: 2586 - protein, 14 aa, Human
CASSGTGANYGYTF

SEQ ID NO: 2587 - protein, 13 aa, Human
CASSIVGGNIQYF

SEQ ID NO: 2588 - protein, 11 aa, Human
CASSKGKTQYF

SEQ ID NO: 2589 - protein, 17 aa, Human
CASSLAPGREHTTPLHF

SEQ ID NO: 2590 - protein, 14 aa, Human
CASSLARENTEAFF

SEQ ID NO: 2591 - protein, 15 aa, Human
CASSLDPQGNTEAFF

SEQ ID NO: 2592 - protein, 14 aa, Human
CASSLDSGTDTQYF

SEQ ID NO: 2593 - protein, 13 aa, Human
CASSLDYMQPQHF

SEQ ID NO: 2594 - protein, 15 aa, Human
CASSLEAAVSYEQYF

SEQ ID NO: 2595 - protein, 16 aa, Human
CASSLGARGNQETQYF

SEQ ID NO: 2596 - protein, 15 aa, Human
CASSLGGLARYEQYF

SEQ ID NO: 2597 - protein, 14 aa, Human
CASSLGLAADTQYF

SEQ ID NO: 2598 - protein, 13 aa, Human
CASSLLQGGEAFF

SEQ ID NO: 2599 - protein, 15 aa, Human
CASSLRDRNTGELFF

SEQ ID NO: 2600 - protein, 19 aa, Human
CASSLVGTPTSGRGNEQFF

SEQ ID NO: 2601 - protein, 17 aa, Human
CASSLVPVQGAINEQFF

SEQ ID NO: 2602 - protein, 13 aa, Human
CASSMGVSYEQYF

SEQ ID NO: 2603 - protein, 16 aa, Human
CASSPGTAWVQETQYF

SEQ ID NO: 2604 - protein, 15 aa, Human
CASSRTSGSFDEQYF

SEQ ID NO: 2605 - protein, 13 aa, Human
CASSSADSPGQYF

SEQ ID NO: 2606 - protein, 15 aa, Human
CASSSGTSAYNEQFF

SEQ ID NO: 2607 - protein, 17 aa, Human
CASSSPVGPRRFGEQFF

SEQ ID NO: 2608 - protein, 18 aa, Human
CASSSPWLAGVFQETQYF

SEQ ID NO: 2609 - protein, 15 aa, Human
CASSTAGTRVNEQFF

SEQ ID NO: 2610 - protein, 19 aa, Human
CASSTVRHAQTANTGELFF

SEQ ID NO: 2611 - protein, 13 aa, Human
CASSVSPTGELFF

SEQ ID NO: 2612 - protein, 14 aa, Human
CASSWRGGTDTQYF

SEQ ID NO: 2613 - protein, 14 aa, Human
CASSYEASQETQYF

SEQ ID NO: 2614 - protein, 13 aa, Human
CASTVGPTGEPFF

SEQ ID NO: 2615 - protein, 16 aa, Human
CASALGASGRTGELFF

SEQ ID NO: 2616 - protein, 13 aa, Human
CASDRTMSTEAFF

SEQ ID NO: 2617 - protein, 13 aa, Human
CASDSPLNTEAFF

SEQ ID NO: 2618 - protein, 13 aa, Human
CASDSTMNTEAFF

SEQ ID NO: 2619 - protein, 16 aa, Human
CASESSSGSDYNEQFF

SEQ ID NO: 2620 - protein, 14 aa, Human
CASFHGVLYNEQFF

SEQ ID NO: 2621 - protein, 12 aa, Human
CASGDSLREQFF

SEQ ID NO: 2622 - protein, 14 aa, Human
CASGLATNPYEQYF

SEQ ID NO: 2623 - protein, 12 aa, Human
CASGLVAGELFF

SEQ ID NO: 2624 - protein, 15 aa, Human
CASGLVQGSYYEQYF

SEQ ID NO: 2625 - protein, 12 aa, Human
CASGQGSYGYTF

SEQ ID NO: 2626 - protein, 12 aa, Human
CASGRENGEQYF

SEQ ID NO: 2627 - protein, 15 aa, Human
CASKSFFQAQETQYF

SEQ ID NO: 2628 - protein, 15 aa, Human
CASLLFQAPPVEQYF

SEQ ID NO: 2629 - protein, 13 aa, Human
CASNEERADTQYF

SEQ ID NO: 2630 - protein, 14 aa, Human
CASRGQGALQPQHF

SEQ ID NO: 2631 - protein, 13 aa, Human
CASRGTGDNEQFF

SEQ ID NO: 2632 - protein, 18 aa, Human
CASRPKFSDPGPNNEQFF

SEQ ID NO: 2633 - protein, 16 aa, Human
CASRSLGTPRLNEQFF

SEQ ID NO: 2634 - protein, 15 aa, Human
CASSARTVAKNIQYF

SEQ ID NO: 2635 - protein, 13 aa, Human
CASSFAGPTEAFF

SEQ ID NO: 2636 - protein, 13 aa, Human
CASSFGGIDGYTF

SEQ ID NO: 2637 - protein, 15 aa, Human
CASSFLAGAGNEQFF

SEQ ID NO: 2638 - protein, 15 aa, Human
CASSFLPSALWDEQF

SEQ ID NO: 2639 - protein, 16 aa, Human
CASSFRIETGRYGYTF

SEQ ID NO: 2640 - protein, 18 aa, Human
CASSFSRGGVGRRETQDF

SEQ ID NO: 2641 - protein, 16 aa, Human
CASSFSTCSANYGYTF

SEQ ID NO: 2642 - protein, 13 aa, Human
CASSITGAYGYTF

SEQ ID NO: 2643 - protein, 15 aa, Human
CASSKDRGSQETQYF

SEQ ID NO: 2644 - protein, 13 aa, Human
CASSLAAYNEQFF

SEQ ID NO: 2645 - protein, 15 aa, Human
CASSLEGAPGTEAFF

SEQ ID NO: 2646 - protein, 15 aa, Human
CASSLELTGPLGYTF

SEQ ID NO: 2647 - protein, 12 aa, Human
CASSLENQPQHF

SEQ ID NO: 2648 - protein, 15 aa, Human
CASSLFWAPPDKQYF

SEQ ID NO: 2649 - protein, 15 aa, Human
CASSLFWAPPVEQYF

SEQ ID NO: 2650 - protein, 15 aa, Human
CASSLFWGPPVKQYF

SEQ ID NO: 2651 - protein, 11 aa, Human
CASSLGETQYF

SEQ ID NO: 2652 - protein, 12 aa, Human
CASSLGGSEAFF

SEQ ID NO: 2653 - protein, 17 aa, Human
CASSLGSGTALGNEQFF

SEQ ID NO: 2654 - protein, 14 aa, Human
CASSLGSLNTEAFF

SEQ ID NO: 2655 - protein, 16 aa, Human
CASSLGTSGRWNEQFF

SEQ ID NO: 2656 - protein, 16 aa, Human
CASSLNPSGDLYGYTF

SEQ ID NO: 2657 - protein, 14 aa, Human
CASSLSGEFYEQYF

SEQ ID NO: 2658 - protein, 13 aa, Human
CASSLSGGNEQYF

SEQ ID NO: 2659 - protein, 15 aa, Human
CASSLSISGGVEQFF

SEQ ID NO: 2660 - protein, 15 aa, Human
CASSLTGIDQETQYF

SEQ ID NO: 2661 - protein, 15 aa, Human
CASSLTSGVGETQYF

SEQ ID NO: 2662 - protein, 14 aa, Human
CASSLTSGYNEQFF

SEQ ID NO: 2663 - protein, 15 aa, Human
CASSLVAGGENEQFF

SEQ ID NO: 2664 - protein, 14 aa, Human
CASSLVGGTYEQYF

SEQ ID NO: 2665 - protein, 14 aa, Human
CASSLYSGRHEQFF

SEQ ID NO: 2666 - protein, 11 aa, Human
CASSPAGELFF

SEQ ID NO: 2667 - protein, 16 aa, Human
CASSPITRAPDNEQFF

SEQ ID NO: 2668 - protein, 15 aa, Human
CASSPRDRVFYEQYF

SEQ ID NO: 2669 - protein, 17 aa, Human
CASSPRTSGRGTDTQYF

SEQ ID NO: 2670 - protein, 14 aa, Human
CASSPSGDYNEQFF

SEQ ID NO: 2671 - protein, 13 aa, Human
CASSPTGAGELFF

SEQ ID NO: 2672 - protein, 13 aa, Human
CASSRTGSDTQYF

SEQ ID NO: 2673 - protein, 14 aa, Human
CASSSGGGSYEQYF

SEQ ID NO: 2674 - protein, 14 aa, Human
CASSSGQGNQPQHF

SEQ ID NO: 2675 - protein, 14 aa, Human
CASSSIDGFYEQYF

SEQ ID NO: 2676 - protein, 18 aa, Human
CASSSPIYRGQLNYGYTF

SEQ ID NO: 2677 - protein, 14 aa, Human
CASSTGTPLYEQYF

SEQ ID NO: 2678 - protein, 17 aa, Human
CASSTLAGGSHTGELFF

SEQ ID NO: 2679 - protein, 13 aa, Human
CASSVASYNEQFF

SEQ ID NO: 2680 - protein, 16 aa, Human
CASSWDLTGEGRVAFF

SEQ ID NO: 2681 - protein, 17 aa, Human
CASSWTSGSSGYNEQFF

SEQ ID NO: 2682 - protein, 15 aa, Human
CASTSSGRDRDTQYF

SEQ ID NO: 2683 - protein, 15 aa, Human
CATLCTHGVGETQYF

SEQ ID NO: 2684 - protein, 19 aa, Human
CGMSSGEWKRGGRGDTSYF

SEQ ID NO: 2685 - protein, 16 aa, Human
CASRLTGTYYNSPLHF

SEQ ID NO: 2686 - protein, 16 aa, Human
CASSFGGEGSYNEQFF

SEQ ID NO: 2687 - protein, 15 aa, Human
CASSFRAGLLGELFF

SEQ ID NO: 2688 - protein, 17 aa, Human
CASSFSGSQFIRKTQYF

SEQ ID NO: 2689 - protein, 16 aa, Human
CASSHGLAGLTGELFF

SEQ ID NO: 2690 - protein, 14 aa, Human
CASSIQRDQETQYF

SEQ ID NO: 2691 - protein, 14 aa, Human
CASSLAASGPAQFF

SEQ ID NO: 2692 - protein, 15 aa, Human
CASSLARGRIHEQYF

SEQ ID NO: 2693 - protein, 13 aa, Human
CASSLEGLDEQYF

SEQ ID NO: 2694 - protein, 12 aa, Human
CASSLGGDEQFF

SEQ ID NO: 2695 - protein, 18 aa, Human
CASSLGRTSGPPRDEQFF

SEQ ID NO: 2696 - protein, 16 aa, Human
CASSLGVGVDGETQYF

SEQ ID NO: 2697 - protein, 15 aa, Human
CASSLGYGSTYEQYF

SEQ ID NO: 2698 - protein, 11 aa, Human
CASSLRGEQYF

SEQ ID NO: 2699 - protein, 11 aa, Human
CASSLVLTPFF

SEQ ID NO: 2700 - protein, 14 aa, Human
CASSLVTPGNTIYF

SEQ ID NO: 2701 - protein, 14 aa, Human
CASSLWRNSYEQYF

SEQ ID NO: 2702 - protein, 15 aa, Human
CASSNPGQGDSPLHF

SEQ ID NO: 2703 - protein, 14 aa, Human
CASSPRDSQETQYF

SEQ ID NO: 2704 - protein, 12 aa, Human
CASSQWTGELFF

SEQ ID NO: 2705 - protein, 12 aa, Human
CASSRGFDTIYF

SEQ ID NO: 2706 - protein, 18 aa, Human
CASSSDNPLAGETDTQYF

SEQ ID NO: 2707 - protein, 17 aa, Human
CASSSDRTSHRTDTQYF

SEQ ID NO: 2708 - protein, 13 aa, Human
CASSSGEGQPQHF

SEQ ID NO: 2709 - protein, 15 aa, Human
CASSSPFEGRDTQYF

SEQ ID NO: 2710 - protein, 15 aa, Human
CASSSRDRGTYEQYF

SEQ ID NO: 2711 - protein, 15 aa, Human
CASSSRGARTDTQYF

SEQ ID NO: 2712 - protein, 13 aa, Human
CAPSHSPGGTHYF

SEQ ID NO: 2713 - protein, 14 aa, Human
CASREPGTGKEQYF

SEQ ID NO: 2714 - protein, 14 aa, Human
CASRISGGLNEQFF

SEQ ID NO: 2715 - protein, 18 aa, Human
CASSHDRDYLSGTDTQYF

SEQ ID NO: 2716 - protein, 15 aa, Human
CASSLLAGSYNEQFF

SEQ ID NO: 2717 - protein, 17 aa, Human
CASSQDPFRGGSYEQYF

SEQ ID NO: 2718 - protein, 12 aa, Human
CASSQDRVAQFF

SEQ ID NO: 2719 - protein, 17 aa, Human
CASSQDYTTSRHNEQFF

SEQ ID NO: 2720 - protein, 19 aa, Human
CASSQEGERTRRGTGELFF

SEQ ID NO: 2721 - protein, 18 aa, Human
CASSQETLAGWYQETQYF

SEQ ID NO: 2722 - protein, 14 aa, Human
CASSQEWGQETQYF

SEQ ID NO: 2723 - protein, 13 aa, Human
CASSQGARTEAFF

SEQ ID NO: 2724 - protein, 19 aa, Human
CASSQGASGRAKGTDTQYF

SEQ ID NO: 2725 - protein, 17 aa, Human
CASSQGLAGVTSYEQYF

SEQ ID NO: 2726 - protein, 13 aa, Human
CASSQGRGKEQYF

SEQ ID NO: 2727 - protein, 18 aa, Human
CASSQPTRQGPNTGELFF

SEQ ID NO: 2728 - protein, 13 aa, Human
CASSQSPGGTQYF

SEQ ID NO: 2729 - protein, 14 aa, Human
CASSTSGHQETQYF

SEQ ID NO: 2730 - protein, 12 aa, Human
CAIQGTSETQYF

SEQ ID NO: 2731 - protein, 14 aa, Human
CATGPERVVDEQFF

SEQ ID NO: 2732 - protein, 17 aa, Human
CATRKPNEPSSYNEQFF

SEQ ID NO: 2733 - protein, 14 aa, Human
CATRLKGGYNEQFF

SEQ ID NO: 2734 - protein, 13 aa, Human
CATSAHGGETQYF

SEQ ID NO: 2735 - protein, 17 aa, Human
CATSDEGQGARTGELFF

SEQ ID NO: 2736 - protein, 13 aa, Human
CATSGLAGEEQFF

SEQ ID NO: 2737 - protein, 16 aa, Human
CATSIAGTMNTGEQFF

SEQ ID NO: 2738 - protein, 13 aa, Human
CATSIVAGENNFF

SEQ ID NO: 2739 - protein, 16 aa, Human
CATSKDYTGSYNEQFF

SEQ ID NO: 2740 - protein, 14 aa, Human
CATSLTSGYNEQFF

SEQ ID NO: 2741 - protein, 13 aa, Human
CATSNHGGETQYF

SEQ ID NO: 2742 - protein, 14 aa, Human
CATSPGGSLSEQYF

SEQ ID NO: 2743 - protein, 15 aa, Human
CATSPRDTVQETQYF

SEQ ID NO: 2744 - protein, 13 aa, Human
CATSRAAGYEQYF

SEQ ID NO: 2745 - protein, 14 aa, Human
CATSRAGANQPQHF

SEQ ID NO: 2746 - protein, 15 aa, Human
CATSRARTGLNEQFF

SEQ ID NO: 2747 - protein, 14 aa, Human
CATSRDAGQYEQYF

SEQ ID NO: 2748 - protein, 16 aa, Human
CATSRDGTSGRYEQYF

SEQ ID NO: 2749 - protein, 16 aa, Human
CATSRDHAASSWPQHF

SEQ ID NO: 2750 - protein, 16 aa, Human
CATSRDPSGRADTQYF

SEQ ID NO: 2751 - protein, 16 aa, Human
CATSRDPSRRIETQYF

SEQ ID NO: 2752 - protein, 14 aa, Human
CATSRDRGDNEQFF

SEQ ID NO: 2753 - protein, 16 aa, Human
CATSREQGSGANVLTF

SEQ ID NO: 2754 - protein, 17 aa, Human
CATSRETGTGGSDTQYF

SEQ ID NO: 2755 - protein, 16 aa, Human
CATSREVGVGSTEAFF

SEQ ID NO: 2756 - protein, 17 aa, Human
CATSRGELLAGASEQYF

SEQ ID NO: 2757 - protein, 15 aa, Human
CATSRGKGGEETQYF

SEQ ID NO: 2758 - protein, 14 aa, Human
CATSRGQGAREQYF

SEQ ID NO: 2759 - protein, 16 aa, Human
CATSRGQLSSYNEQFF

SEQ ID NO: 2760 - protein, 15 aa, Human
CATSRGRGESQPQHF

SEQ ID NO: 2761 - protein, 17 aa, Human
CATSRGTGRRGTDTQYF

SEQ ID NO: 2762 - protein, 14 aa, Human
CATSRGTSANEQFF

SEQ ID NO: 2763 - protein, 16 aa, Human
CATSRRLADSSYEQYF

SEQ ID NO: 2764 - protein, 14 aa, Human
CATSRRTAPYEQYF

SEQ ID NO: 2765 - protein, 15 aa, Human
CATSRSSGQWYEQYF

SEQ ID NO: 2766 - protein, 13 aa, Human
CATSRVSGDEAFF

SEQ ID NO: 2767 - protein, 13 aa, Human
CATSRWGGETQYF

SEQ ID NO: 2768 - protein, 15 aa, Human
CATSRYRESNSPLHF

SEQ ID NO: 2769 - protein, 15 aa, Human
CATSSAATSTDTQYF

SEQ ID NO: 2770 - protein, 14 aa, Human
CATSSFGTQYEQYF

SEQ ID NO: 2771 - protein, 13 aa, Human
CATSSHGGETQYF

SEQ ID NO: 2772 - protein, 13 aa, Human
CATSSTAGETQYF

SEQ ID NO: 2773 - protein, 13 aa, Human
CATSTVAGETQYF

SEQ ID NO: 2774 - protein, 14 aa, Human
CASSPEVSQETQYF

SEQ ID NO: 2775 - protein, 14 aa, Human
CASSPGAGNTEAFF

SEQ ID NO: 2776 - protein, 17 aa, Human
CASSPGQSGEFGNTIYF

SEQ ID NO: 2777 - protein, 13 aa, Human
CASSPGSGQPQHF

SEQ ID NO: 2778 - protein, 16 aa, Human
CASSPPDRRTGNTIYF

SEQ ID NO: 2779 - protein, 16 aa, Human
CASSPPVAALESPLHF

SEQ ID NO: 2780 - protein, 14 aa, Human
CASSPRDGANEQFF

SEQ ID NO: 2781 - protein, 17 aa, Human
CASSPVQGASGANVLTF

SEQ ID NO: 2782 - protein, 15 aa, Human
CASSQGQGSTGELFF

SEQ ID NO: 2783 - protein, 16 aa, Human
CASSRTGPESPYEQYF

SEQ ID NO: 2784 - protein, 14 aa, Human
CASSRTTNTGELFF

SEQ ID NO: 2785 - protein, 16 aa, Human
CASAGGRLAVRDTQYF

SEQ ID NO: 2786 - protein, 12 aa, Human
CASEDQVDTQYF

SEQ ID NO: 2787 - protein, 14 aa, Human
CASGQKTSGNTIYF

SEQ ID NO: 2788 - protein, 10 aa, Human
CASGSGGYTF

SEQ ID NO: 2789 - protein, 12 aa, Human
CASGTGPYEQYF

SEQ ID NO: 2790 - protein, 13 aa, Human
CASHGRVGTEAFF

SEQ ID NO: 2791 - protein, 15 aa, Human
CASIQGAGSNQPQHF

SEQ ID NO: 2792 - protein, 13 aa, Human
CASLAGGLNEQFF

SEQ ID NO: 2793 - protein, 16 aa, Human
CASMIPSTGGRAEAFF

SEQ ID NO: 2794 - protein, 15 aa, Human
CASQGLAGSYNEQFF

SEQ ID NO: 2795 - protein, 12 aa, Human
CASRGDSYEQYF

SEQ ID NO: 2796 - protein, 13 aa, Human
CASRHWLTGELFF

SEQ ID NO: 2797 - protein, 13 aa, Human
CASRSGPTGELFF

SEQ ID NO: 2798 - protein, 15 aa, Human
CASRSSGGNLYEQYF

SEQ ID NO: 2799 - protein, 14 aa, Human
CASRVAAYNQPQHF

SEQ ID NO: 2800 - protein, 15 aa, Human
CASRVAGGPYNEQFF

SEQ ID NO: 2801 - protein, 13 aa, Human
CASSAGTAYGYTF

SEQ ID NO: 2802 - protein, 14 aa, Human
CASSALLAPGELFF

SEQ ID NO: 2803 - protein, 17 aa, Human
CASSATSGSGNYNEQFF

SEQ ID NO: 2804 - protein, 17 aa, Human
CASSFTSGSIWAGELFF

SEQ ID NO: 2805 - protein, 17 aa, Human
CASSGLAGSSRADTQYF

SEQ ID NO: 2806 - protein, 17 aa, Human
CASSGLSGSSRADTHYF

SEQ ID NO: 2807 - protein, 16 aa, Human
CASSGRQGKNTGELFF

SEQ ID NO: 2808 - protein, 12 aa, Human
CASSIADREAFF

SEQ ID NO: 2809 - protein, 13 aa, Human
CASSIAGYNEQFF

SEQ ID NO: 2810 - protein, 14 aa, Human
CASSIAVGLNEQFF

SEQ ID NO: 2811 - protein, 16 aa, Human
CASSIDGGAGVYEQYF

SEQ ID NO: 2812 - protein, 13 aa, Human
CASSIDKPNEQFF

SEQ ID NO: 2813 - protein, 15 aa, Human
CASSIDSDLNQPQHF

SEQ ID NO: 2814 - protein, 17 aa, Human
CASSIDTSGGSYNEQFF

SEQ ID NO: 2815 - protein, 16 aa, Human
CASSIDWTGYLETQYF

SEQ ID NO: 2816 - protein, 14 aa, Human
CASSIFFGSYEQYF

SEQ ID NO: 2817 - protein, 11 aa, Human
CASSIFGEQHF

SEQ ID NO: 2818 - protein, 16 aa, Human
CASSIFGTSYTGELFF

SEQ ID NO: 2819 - protein, 15 aa, Human
CASSIGASGSLEQFF

SEQ ID NO: 2820 - protein, 16 aa, Human
CASSIGGLAGADTQYF

SEQ ID NO: 2821 - protein, 16 aa, Human
CASSIGGTYGNQPQHF

SEQ ID NO: 2822 - protein, 18 aa, Human
CASSIGHTGGLAKNIQYF

SEQ ID NO: 2823 - protein, 15 aa, Human
CASSIGQVSYNEQFF

SEQ ID NO: 2824 - protein, 16 aa, Human
CASSIGSGGYFYGYTF

SEQ ID NO: 2825 - protein, 14 aa, Human
CASSIGTGSYEQYF

SEQ ID NO: 2826 - protein, 11 aa, Human
CASSIGYGYTF

SEQ ID NO: 2827 - protein, 17 aa, Human
CASSIISGRDAYNEQFF

SEQ ID NO: 2828 - protein, 17 aa, Human
CASSIKQGAGMNTEAFF

SEQ ID NO: 2829 - protein, 12 aa, Human
CASSILFNEQFF

SEQ ID NO: 2830 - protein, 15 aa, Human
CASSILLAAYNEQFF

SEQ ID NO: 2831 - protein, 14 aa, Human
CASSILLGHNEQFF

SEQ ID NO: 2832 - protein, 13 aa, Human
CASSINSNQPQHF

SEQ ID NO: 2833 - protein, 14 aa, Human
CASSIRDSQETQYF

SEQ ID NO: 2834 - protein, 16 aa, Human
CASSISGTGSNQPQHF

SEQ ID NO: 2835 - protein, 15 aa, Human
CASSISRDRAREQYF

SEQ ID NO: 2836 - protein, 15 aa, Human
CASSITSGEPYEQYF

SEQ ID NO: 2837 - protein, 13 aa, Human
CASSIVLNQPQHF

SEQ ID NO: 2838 - protein, 15 aa, Human
CASSIVVDSYYEQYF

SEQ ID NO: 2839 - protein, 15 aa, Human
CASSIWGGGTHPQVF

SEQ ID NO: 2840 - protein, 13 aa, Human
CASSIWPADEQYF

SEQ ID NO: 2841 - protein, 13 aa, Human
CASSLASGGELFF

SEQ ID NO: 2842 - protein, 14 aa, Human
CASSLLGGSYEQYF

SEQ ID NO: 2843 - protein, 14 aa, Human
CASSLRSREYEQYF

SEQ ID NO: 2844 - protein, 13 aa, Human
CASSMDPGQPQHF

SEQ ID NO: 2845 - protein, 13 aa, Human
CASSMGMGEPQHF

SEQ ID NO: 2846 - protein, 14 aa, Human
CASSMLPGTDTQYF

SEQ ID NO: 2847 - protein, 17 aa, Human
CASSMTSGGSSYNEQFF

SEQ ID NO: 2848 - protein, 18 aa, Human
CASSMVRLRGTLNNEQFF

SEQ ID NO: 2849 - protein, 11 aa, Human
CASSMYNEQFF

SEQ ID NO: 2850 - protein, 16 aa, Human
CASSNALAGPYNEQFF

SEQ ID NO: 2851 - protein, 14 aa, Human
CASSNGAIWNEQFF

SEQ ID NO: 2852 - protein, 16 aa, Human
CASSPAPGQGKDGYTF

SEQ ID NO: 2853 - protein, 14 aa, Human
CASSPGLKTGEQFF

SEQ ID NO: 2854 - protein, 16 aa, Human
CASSPIGTGEVQPQHF

SEQ ID NO: 2855 - protein, 15 aa, Human
CASSPPGGGQDTQYF

SEQ ID NO: 2856 - protein, 16 aa, Human
CASSPTDTSSYNEQFF

SEQ ID NO: 2857 - protein, 15 aa, Human
CASSPYRQGEDIQYF

SEQ ID NO: 2858 - protein, 15 aa, Human
CASSQGFTSNQPQHF

SEQ ID NO: 2859 - protein, 14 aa, Human
CASSQQGGNSPLHF

SEQ ID NO: 2860 - protein, 14 aa, Human
CASSQTATNEKLFF

SEQ ID NO: 2861 - protein, 13 aa, Human
CASSQTGADTQYF

SEQ ID NO: 2862 - protein, 13 aa, Human
CASSQTGGYEQYF

SEQ ID NO: 2863 - protein, 15 aa, Human
CASSRDPSGIDTQYF

SEQ ID NO: 2864 - protein, 13 aa, Human
CASSRGFSNEQYF

SEQ ID NO: 2865 - protein, 15 aa, Human
CASSRLAIGTDTQYF

SEQ ID NO: 2866 - protein, 16 aa, Human
CASSSAEEGVGEKLFF

SEQ ID NO: 2867 - protein, 15 aa, Human
CASSSAGGWSTEAFF

SEQ ID NO: 2868 - protein, 22 aa, Human
CASSSEVWGDRGLAGPYNEQFF

SEQ ID NO: 2869 - protein, 15 aa, Human
CASSSRQVSYNEQFF

SEQ ID NO: 2870 - protein, 16 aa, Human
CASSSSWDRVYNEQFF

SEQ ID NO: 2871 - protein, 11 aa, Human
CASSTAGELFF

SEQ ID NO: 2872 - protein, 13 aa, Human
CASSTAVAYEQYF

SEQ ID NO: 2873 - protein, 17 aa, Human
CASSTGLAGVRAGELFF

SEQ ID NO: 2874 - protein, 19 aa, Human
CASSTHEGLAGGQGDEQFF

SEQ ID NO: 2875 - protein, 16 aa, Human
CASSTNADDLTGELFF

SEQ ID NO: 2876 - protein, 14 aa, Human
CASSVGQGRTEAFF

SEQ ID NO: 2877 - protein, 15 aa, Human
CASSVRDGGTYEQYF

SEQ ID NO: 2878 - protein, 14 aa, Human
CASTNGINTGELFF

SEQ ID NO: 2879 - protein, 17 aa, Human
CASTPGEGTSRTGELFF

SEQ ID NO: 2880 - protein, 11 aa, Human
CASVQGGEQCF

SEQ ID NO: 2881 - protein, 11 aa, Human
CASVQGGEQYF

SEQ ID NO: 2882 - protein, 16 aa, Human
CASYGPWRASYNEQFF

SEQ ID NO: 2883 - protein, 10 aa, Human
CATKAGELFF

SEQ ID NO: 2884 - protein, 14 aa, Human
CASSKSRENSPLHF

SEQ ID NO: 2885 - protein, 18 aa, Human
CSAARDKLPLLWGYEQYF

SEQ ID NO: 2886 - protein, 15 aa, Human
CSADAGGANTGELFF

SEQ ID NO: 2887 - protein, 13 aa, Human
CSADKTSYNEQFF

SEQ ID NO: 2888 - protein, 11 aa, Human
CSADREPEAFF

SEQ ID NO: 2889 - protein, 15 aa, Human
CSADTGGANTGELFF

SEQ ID NO: 2890 - protein, 15 aa, Human
CSADTSVPSYNEQFF

SEQ ID NO: 2891 - protein, 13 aa, Human
CSAETGTSIEQYF

SEQ ID NO: 2892 - protein, 15 aa, Human
CSAFPPGGPSDTQYF

SEQ ID NO: 2893 - protein, 14 aa, Human
CSAGAGAGQETQYF

SEQ ID NO: 2894 - protein, 17 aa, Human
CSAGGWDRGLKGTEAFF

SEQ ID NO: 2895 - protein, 18 aa, Human
CSAGIIVRLAASTDTQYF

SEQ ID NO: 2896 - protein, 13 aa, Human
CSAGQGGKETQYF

SEQ ID NO: 2897 - protein, 15 aa, Human
CSAHAAGGEGQPQHF

SEQ ID NO: 2898 - protein, 16 aa, Human
CSAIASGRAGPDTQYF

SEQ ID NO: 2899 - protein, 14 aa, Human
CSAIEGSGWNEQYF

SEQ ID NO: 2900 - protein, 14 aa, Human
CSAIRAGGHETQYF

SEQ ID NO: 2901 - protein, 15 aa, Human
CSAIRTSGVGDTQYF

SEQ ID NO: 2902 - protein, 17 aa, Human
CSAITPGHRSGANVLTF

SEQ ID NO: 2903 - protein, 14 aa, Human
CSALGDRTGYEQYF

SEQ ID NO: 2904 - protein, 15 aa, Human
CSALGELAGVGEQFF

SEQ ID NO: 2905 - protein, 14 aa, Human
CSALSGTPHNEQFF

SEQ ID NO: 2906 - protein, 10 aa, Human
CSALVGIHTF

SEQ ID NO: 2907 - protein, 12 aa, Human
CSANPQGYGYTF

SEQ ID NO: 2908 - protein, 15 aa, Human
CSANSGLAGTNEQFF

SEQ ID NO: 2909 - protein, 14 aa, Human
CSANSMSGSETQYF

SEQ ID NO: 2910 - protein, 19 aa, Human
CSAPASLASQRGSYNEQFF

SEQ ID NO: 2911 - protein, 15 aa, Human
CSAPGGTDLNQPQHF

SEQ ID NO: 2912 - protein, 15 aa, Human
CSAPLIREGPGELFF

SEQ ID NO: 2913 - protein, 15 aa, Human
CSAPNLNRGDYEQYF

SEQ ID NO: 2914 - protein, 19 aa, Human
CSAPNTGGQGRWSNQPQHF

SEQ ID NO: 2915 - protein, 13 aa, Human
CSAPTGDASEKYF

SEQ ID NO: 2916 - protein, 15 aa, Human
CSAPWASGSRGTQYF

SEQ ID NO: 2917 - protein, 15 aa, Human
CSARAHGHSNEKLFF

SEQ ID NO: 2918 - protein, 14 aa, Human
CSARALAGEYEQYF

SEQ ID NO: 2919 - protein, 14 aa, Human
CSARALGGGQPQHF

SEQ ID NO: 2920 - protein, 15 aa, Human
CSARDDGTSHNEQFF

SEQ ID NO: 2921 - protein, 15 aa, Human
CSARDDKGPGDEQFF

SEQ ID NO: 2922 - protein, 15 aa, Human
CSARDEGLLSYEQYF

SEQ ID NO: 2923 - protein, 15 aa, Human
CSARDEGRDYNEQFF

SEQ ID NO: 2924 - protein, 18 aa, Human
CSARDFGGRRASYNEQFF

SEQ ID NO: 2925 - protein, 14 aa, Human
CSARDFTSSNEQFF

SEQ ID NO: 2926 - protein, 13 aa, Human
CSARDGIYNEQFF

SEQ ID NO: 2927 - protein, 13 aa, Human
CSARDGNTGELFF

SEQ ID NO: 2928 - protein, 16 aa, Human
CSARDGSGMNTGELFF

SEQ ID NO: 2929 - protein, 13 aa, Human
CSARDGTGNGYTF

SEQ ID NO: 2930 - protein, 16 aa, Human
CSARDGTHYSNQPQHF

SEQ ID NO: 2931 - protein, 16 aa, Human
CSARDHLAGAFNEQFF

SEQ ID NO: 2932 - protein, 15 aa, Human
CSARDLGGFKDTQYF

SEQ ID NO: 2933 - protein, 13 aa, Human
CSARDLGTGELFF

SEQ ID NO: 2934 - protein, 14 aa, Human
CSARDLGTNEKLFF

SEQ ID NO: 2935 - protein, 15 aa, Human
CSARDNIATNEKLFF

SEQ ID NO: 2936 - protein, 15 aa, Human
CSARDPAANTGELFF

SEQ ID NO: 2937 - protein, 14 aa, Human
CSARDPDRLYEQYF

SEQ ID NO: 2938 - protein, 18 aa, Human
CSARDPGLAGREWVRQFF

SEQ ID NO: 2939 - protein, 19 aa, Human
CSARDPTATGLADYNEQFF

SEQ ID NO: 2940 - protein, 17 aa, Human
CSARDPYALAGIYEQYF

SEQ ID NO: 2941 - protein, 15 aa, Human
CSARDQTGIFGEQYF

SEQ ID NO: 2942 - protein, 16 aa, Human
CSARDREGGEVDTQYF

SEQ ID NO: 2943 - protein, 14 aa, Human
CSARDRPHSYEQYF

SEQ ID NO: 2944 - protein, 14 aa, Human
CSARDRRGHYGYTF

SEQ ID NO: 2945 - protein, 15 aa, Human
CSARDRRRINQPQHF

SEQ ID NO: 2946 - protein, 13 aa, Human
CSARDRSSYEQYF

SEQ ID NO: 2947 - protein, 14 aa, Human
CSARDSGAAYEQYF

SEQ ID NO: 2948 - protein, 15 aa, Human
CSARDTPSGNQPQHF

SEQ ID NO: 2949 - protein, 16 aa, Human
CSARDVLAGKMETQYF

SEQ ID NO: 2950 - protein, 14 aa, Human
CSARDWDSSYEQYF

SEQ ID NO: 2951 - protein, 15 aa, Human
CSAREGDRDTDTQYF

SEQ ID NO: 2952 - protein, 13 aa, Human
CSARETGYYEQYF

SEQ ID NO: 2953 - protein, 18 aa, Human
CSARFSGRATQMQETQYF

SEQ ID NO: 2954 - protein, 15 aa, Human
CSARGAAWYQETQYF

SEQ ID NO: 2955 - protein, 14 aa, Human
CSARGAGVPNEQFF

SEQ ID NO: 2956 - protein, 13 aa, Human
CSARGGGNSPLHF

SEQ ID NO: 2957 - protein, 16 aa, Human
CSARGGVSGRTDTQYF

SEQ ID NO: 2958 - protein, 13 aa, Human
CSARGKRDYEQYF

SEQ ID NO: 2959 - protein, 15 aa, Human
CSARGLRDDSYEQYF

SEQ ID NO: 2960 - protein, 15 aa, Human
CSARGMDYLSYEQYF

SEQ ID NO: 2961 - protein, 14 aa, Human
CSARGPSVSYEQYF

SEQ ID NO: 2962 - protein, 15 aa, Human
CSARGQWASSYEQYF

SEQ ID NO: 2963 - protein, 13 aa, Human
CSARGTAEYEQYF

SEQ ID NO: 2964 - protein, 14 aa, Human
CSARHTSFQETQYF

SEQ ID NO: 2965 - protein, 14 aa, Human
CSARIAGVAYEQYF

SEQ ID NO: 2966 - protein, 13 aa, Human
CSARILLEGEAFF

SEQ ID NO: 2967 - protein, 14 aa, Human
CSARKLGIEDTQYF

SEQ ID NO: 2968 - protein, 14 aa, Human
CSARLAGDTGELFF

SEQ ID NO: 2969 - protein, 14 aa, Human
CSARLERGDNEQFF

SEQ ID NO: 2970 - protein, 13 aa, Human
CSARLRDTYEQYF

SEQ ID NO: 2971 - protein, 16 aa, Human
CSARMGLAGDTGELFF

SEQ ID NO: 2972 - protein, 15 aa, Human
CSARNGEPGPNEQFF

SEQ ID NO: 2973 - protein, 15 aa, Human
CSARNRDGAYNEQFF

SEQ ID NO: 2974 - protein, 12 aa, Human
CSARPGGYEQYF

SEQ ID NO: 2975 - protein, 14 aa, Human
CSARQGLGNQPQHF

SEQ ID NO: 2976 - protein, 13 aa, Human
CSARRAGADTQYF

SEQ ID NO: 2977 - protein, 14 aa, Human
CSARRQGSAYEQYF

SEQ ID NO: 2978 - protein, 12 aa, Human
CSARSRTYEQYF

SEQ ID NO: 2979 - protein, 14 aa, Human
CSARTRLILEPQHF

SEQ ID NO: 2980 - protein, 13 aa, Human
CSARTSGDNEQFF

SEQ ID NO: 2981 - protein, 16 aa, Human
CSARTSGRGLGGEQYF

SEQ ID NO: 2982 - protein, 16 aa, Human
CSARTSGRLNPDEQFF

SEQ ID NO: 2983 - protein, 16 aa, Human
CSARVAGAGESDTQYF

SEQ ID NO: 2984 - protein, 12 aa, Human
CSARVLDYEQYF

SEQ ID NO: 2985 - protein, 14 aa, Human
CSARVPGQNYEQYF

SEQ ID NO: 2986 - protein, 18 aa, Human
CSARVPPETGTYTYEQYF

SEQ ID NO: 2987 - protein, 13 aa, Human
CSARVREAETQYF

SEQ ID NO: 2988 - protein, 15 aa, Human
CSARVREGLSNEQFF

SEQ ID NO: 2989 - protein, 15 aa, Human
CSASADRGSGREQYF

SEQ ID NO: 2990 - protein, 11 aa, Human
CSASAGGEQFF

SEQ ID NO: 2991 - protein, 15 aa, Human
CSASAGGTGHHPQHF

SEQ ID NO: 2992 - protein, 15 aa, Human
CSASAGGTGHQPQFF

SEQ ID NO: 2993 - protein, 15 aa, Human
CSASAGGTGHQPQHF

SEQ ID NO: 2994 - protein, 15 aa, Human
CSASARDGFTYEQYF

SEQ ID NO: 2995 - protein, 16 aa, Human
CSASDLAGETTDTQYF

SEQ ID NO: 2996 - protein, 15 aa, Human
CSASGAGISSYEQYF

SEQ ID NO: 2997 - protein, 16 aa, Human
CSASGGAGSSKNIQYF

SEQ ID NO: 2998 - protein, 18 aa, Human
CSASGGLAGGSTYNEQFF

SEQ ID NO: 2999 - protein, 14 aa, Human
CSASGLADSYEQYF

SEQ ID NO: 3000 - protein, 12 aa, Human
CSASGSQETQYF

SEQ ID NO: 3001 - protein, 13 aa, Human
CSASGTGVSGAFF

SEQ ID NO: 3002 - protein, 15 aa, Human
CSASHGSGFTYEQYF

SEQ ID NO: 3003 - protein, 15 aa, Human
CSASKSGYPPSEQFF

SEQ ID NO: 3004 - protein, 14 aa, Human
CSASPGVGDTEAFF

SEQ ID NO: 3005 - protein, 17 aa, Human
CSASPNDDWRAFGGYTF

SEQ ID NO: 3006 - protein, 15 aa, Human
CSASPREGLNTEAFF

SEQ ID NO: 3007 - protein, 14 aa, Human
CSASPWRSYNEQFF

SEQ ID NO: 3008 - protein, 15 aa, Human
CSASRKVLSTDTQYF

SEQ ID NO: 3009 - protein, 16 aa, Human
CSASSDSYFSNQPQHF

SEQ ID NO: 3010 - protein, 17 aa, Human
CSASTIVGLAGAYEQFF

SEQ ID NO: 3011 - protein, 16 aa, Human
CSASTPTSGGTDTQYF

SEQ ID NO: 3012 - protein, 16 aa, Human
CSASTSPVGGLDEQYF

SEQ ID NO: 3013 - protein, 21 aa, Human
CSATETGTSGSWEEPVETQYF

SEQ ID NO: 3014 - protein, 15 aa, Human
CSATGESSYNSPLHF

SEQ ID NO: 3015 - protein, 13 aa, Human
CSATGTLSDEQFF

SEQ ID NO: 3016 - protein, 16 aa, Human
CSATPGGPSSYNEQFF

SEQ ID NO: 3017 - protein, 16 aa, Human
CSATPTSTQVPYEQYF

SEQ ID NO: 3018 - protein, 13 aa, Human
CSATQRSYEQYFF

SEQ ID NO: 3019 - protein, 15 aa, Human
CSATSGTTGAYEQYF

SEQ ID NO: 3020 - protein, 17 aa, Human
CSATSPLGALEDREQYF

SEQ ID NO: 3021 - protein, 12 aa, Human
CSATTKPHEQYF

SEQ ID NO: 3022 - protein, 13 aa, Human
CSAVGLGEETQYF

SEQ ID NO: 3023 - protein, 16 aa, Human
CSAWGHQGAGHAEQFF

SEQ ID NO: 3024 - protein, 17 aa, Human
CSAWRGTGGPTSREQFF

SEQ ID NO: 3025 - protein, 16 aa, Human
CSCEGEGLAGGSEQYF

SEQ ID NO: 3026 - protein, 11 aa, Human
CSDPSRETQYF

SEQ ID NO: 3027 - protein, 14 aa, Human
CSGAGRRTQETQYF

SEQ ID NO: 3028 - protein, 14 aa, Human
CSGRSQGLRETQYF

SEQ ID NO: 3029 - protein, 13 aa, Human
CSSLGRNYNEQFF

SEQ ID NO: 3030 - protein, 13 aa, Human
CSTPGAGGSEQYF

SEQ ID NO: 3031 - protein, 15 aa, Human
CSVLSPSSFVNIQYF

SEQ ID NO: 3032 - protein, 13 aa, Human
CTTKAKLQGEQFF

SEQ ID NO: 3033 - protein, 17 aa, Human
CASSFNNSRSGGRGYTF

SEQ ID NO: 3034 - protein, 16 aa, Human
CASSHPGQPITYEQYF

SEQ ID NO: 3035 - protein, 15 aa, Human
CASSHQDRGPTEAFF

SEQ ID NO: 3036 - protein, 16 aa, Human
CASSPPGVRAKNIQYF

SEQ ID NO: 3037 - protein, 16 aa, Human
CASSQRTESGANVLTF

SEQ ID NO: 3038 - protein, 20 aa, Human
CASSQSTFTSGSHTTGELFF

SEQ ID NO: 3039 - protein, 17 aa, Human
CATGDPEGQKNTGELFF

SEQ ID NO: 3040 - protein, 11 aa, Human
CATGSGNEQYF

SEQ ID NO: 3041 - protein, 15 aa, Human
CATISSGSSYNEQFF

SEQ ID NO: 3042 - protein, 12 aa, Human
CATMGTGGEAFF

SEQ ID NO: 3043 - protein, 11 aa, Human
CATMTGNEQFF

SEQ ID NO: 3044 - protein, 16 aa, Human
CATRTIAGDPYNEQFF

SEQ ID NO: 3045 - protein, 12 aa, Human
CATSAGAGELFF

SEQ ID NO: 3046 - protein, 15 aa, Human
CATSAPGGYGETQYF

SEQ ID NO: 3047 - protein, 13 aa, Human
CATSDFRGDEQFF

SEQ ID NO: 3048 - protein, 16 aa, Human
CATSDFRTGDTGELFF

SEQ ID NO: 3049 - protein, 15 aa, Human
CATSDLDSRQETQYF

SEQ ID NO: 3050 - protein, 17 aa, Human
CATSDLPEGSNGNTIYF

SEQ ID NO: 3051 - protein, 14 aa, Human
CATSDLQGDQPQHF

SEQ ID NO: 3052 - protein, 17 aa, Human
CATSDLQLAGGSDELFF

SEQ ID NO: 3053 - protein, 14 aa, Human
CATSDLSSTDTQYF

SEQ ID NO: 3054 - protein, 16 aa, Human
CATSDLTGASTDTQYF

SEQ ID NO: 3055 - protein, 14 aa, Human
CATSDLTPGGTEAF

SEQ ID NO: 3056 - protein, 13 aa, Human
CATSDLWGGEQFF

SEQ ID NO: 3057 - protein, 17 aa, Human
CATSDPEGQKNTGELFF

SEQ ID NO: 3058 - protein, 17 aa, Human
CATSDPPRGADTGELFF

SEQ ID NO: 3059 - protein, 14 aa, Human
CATSDPRAGVVQYF

SEQ ID NO: 3060 - protein, 14 aa, Human
CATSDPSGGVEQFF

SEQ ID NO: 3061 - protein, 18 aa, Human
CATSDPYLPGLAKNIQYF

SEQ ID NO: 3062 - protein, 15 aa, Human
CATSDQQGSYNEQFF

SEQ ID NO: 3063 - protein, 16 aa, Human
CATSDQTSGVTGELFF

SEQ ID NO: 3064 - protein, 15 aa, Human
CATSDRRTSTDTQYF

SEQ ID NO: 3065 - protein, 16 aa, Human
CATSDSGGRKYTEHFF

SEQ ID NO: 3066 - protein, 17 aa, Human
CATSDSGMREPTDTQYF

SEQ ID NO: 3067 - protein, 14 aa, Human
CATSDSHQSHEQYF

SEQ ID NO: 3068 - protein, 15 aa, Human
CATSDSSGREYNEQF

SEQ ID NO: 3069 - protein, 15 aa, Human
CATSDTESLTNTQYF

SEQ ID NO: 3070 - protein, 15 aa, Human
CATSEGRGYVGELFF

SEQ ID NO: 3071 - protein, 16 aa, Human
CATSEREMGQTNEQFF

SEQ ID NO: 3072 - protein, 14 aa, Human
CATSERTATHEQYF

SEQ ID NO: 3073 - protein, 15 aa, Human
CATSFRTPEGNTQYF

SEQ ID NO: 3074 - protein, 13 aa, Human
CATSGEVATEAFF

SEQ ID NO: 3075 - protein, 16 aa, Human
CATSPGQGAVTGELFF

SEQ ID NO: 3076 - protein, 14 aa, Human
CATTAGDYNNEQFF

SEQ ID NO: 3077 - protein, 13 aa, Human
CASAVAVNTEAFF

SEQ ID NO: 3078 - protein, 12 aa, Human
CASELAVGELFF

SEQ ID NO: 3079 - protein, 11 aa, Human
CASGQGVRQYF

SEQ ID NO: 3080 - protein, 13 aa, Human
CASRMGYSGELFF

SEQ ID NO: 3081 - protein, 14 aa, Human
CASSAQGELYEQYF

SEQ ID NO: 3082 - protein, 13 aa, Human
CASSATEFDEQFF

SEQ ID NO: 3083 - protein, 16 aa, Human
CASSEAAGGVGETQYF

SEQ ID NO: 3084 - protein, 13 aa, Human
CASSETVGHGYTF

SEQ ID NO: 3085 - protein, 17 aa, Human
CASSEYEDASSYNEQFF

SEQ ID NO: 3086 - protein, 18 aa, Human
CASSEYKAPKAQDDTQYF

SEQ ID NO: 3087 - protein, 15 aa, Human
CASSEYSWRTDTQYF

SEQ ID NO: 3088 - protein, 14 aa, Human
CASSFSGSYNEQFF

SEQ ID NO: 3089 - protein, 12 aa, Human
CASSLGGYEQYF

SEQ ID NO: 3090 - protein, 11 aa, Human
CASSVGDEQYF

SEQ ID NO: 3091 - protein, 11 aa, Human
CASTMGDEQFF

SEQ ID NO: 3092 - protein, 11 aa, Human
CASTPGDTQYF

SEQ ID NO: 3093 - protein, 15 aa, Human
CASRLFLGCHNEQFF

SEQ ID NO: 3094 - protein, 15 aa, Human
CAARIHPSPYNDHFF

SEQ ID NO: 3095 - protein, 14 aa, Human
CAARLQGANYEEYF

SEQ ID NO: 3096 - protein, 15 aa, Human
CAQQGPLLWHTEAFF

SEQ ID NO: 3097 - protein, 17 aa, Human
CASERREASVAYNEQFF

SEQ ID NO: 3098 - protein, 14 aa, Human
CASFPGGADTEAFF

SEQ ID NO: 3099 - protein, 15 aa, Human
CASGHGLPSTDTQYF

SEQ ID NO: 3100 - protein, 13 aa, Human
CASGLRASSEQYF

SEQ ID NO: 3101 - protein, 10 aa, Human
CASGWKLQYF

SEQ ID NO: 3102 - protein, 12 aa, Human
CASKTGTYEQYF

SEQ ID NO: 3103 - protein, 13 aa, Human
CASKVGPPYEQYF

SEQ ID NO: 3104 - protein, 14 aa, Human
CASLGGPPGETQYF

SEQ ID NO: 3105 - protein, 14 aa, Human
CASNLGTFGDSRYF

SEQ ID NO: 3106 - protein, 13 aa, Human
CASRDQGGDIQYF

SEQ ID NO: 3107 - protein, 13 aa, Human
CASRDRTDEGQYF

SEQ ID NO: 3108 - protein, 11 aa, Human
CASRGGGELFF

SEQ ID NO: 3109 - protein, 15 aa, Human
CASRIQPSPYNEQFF

SEQ ID NO: 3110 - protein, 13 aa, Human
CASRKTRRYGYTF

SEQ ID NO: 3111 - protein, 13 aa, Human
CASRLAGVNEQYF

SEQ ID NO: 3112 - protein, 14 aa, Human
CASRLLAGAYEQYF

SEQ ID NO: 3113 - protein, 13 aa, Human
CASRTGSLGEQYF

SEQ ID NO: 3114 - protein, 13 aa, Human
CASRTGVVNEQFF

SEQ ID NO: 3115 - protein, 15 aa, Human
CASRTSTSPYHDQFF

SEQ ID NO: 3116 - protein, 15 aa, Human
CASSDGQVSNQPQHF

SEQ ID NO: 3117 - protein, 14 aa, Human
CASSDRPGVDGYTF

SEQ ID NO: 3118 - protein, 13 aa, Human
CASSFGQGYGYTF

SEQ ID NO: 3119 - protein, 13 aa, Human
CASSFGRGTEAFF

SEQ ID NO: 3120 - protein, 15 aa, Human
CASSFGTSVSYEQYF

SEQ ID NO: 3121 - protein, 14 aa, Human
CASSFLGDNYGYTF

SEQ ID NO: 3122 - protein, 15 aa, Human
CASSFPGQGYNEQFF

SEQ ID NO: 3123 - protein, 13 aa, Human
CASSFSDDNEQFF

SEQ ID NO: 3124 - protein, 13 aa, Human
CASSFTGVHEQFF

SEQ ID NO: 3125 - protein, 16 aa, Human
CASSFTLGTGGNEQYF

SEQ ID NO: 3126 - protein, 14 aa, Human
CASSFVTGGQPQHF

SEQ ID NO: 3127 - protein, 12 aa, Human
CASSGLDYEQYF

SEQ ID NO: 3128 - protein, 13 aa, Human
CASSGYSGDEQYF

SEQ ID NO: 3129 - protein, 14 aa, Human
CASSHWTGESEQYF

SEQ ID NO: 3130 - protein, 16 aa, Human
CASSIGTGGPQETQYF

SEQ ID NO: 3131 - protein, 15 aa, Human
CASSIRRGGGETQYF

SEQ ID NO: 3132 - protein, 14 aa, Human
CASSISGRGNEQFF

SEQ ID NO: 3133 - protein, 13 aa, Human
CASSLAGGYEQYF

SEQ ID NO: 3134 - protein, 16 aa, Human
CASSLAGLARWETQYF

SEQ ID NO: 3135 - protein, 17 aa, Human
CASSLEEAGVARNEQFF

SEQ ID NO: 3136 - protein, 15 aa, Human
CASSLFAGSYNEQFF

SEQ ID NO: 3137 - protein, 12 aa, Human
CASSLFDNEQFF

SEQ ID NO: 3138 - protein, 16 aa, Human
CASSLFGAGGGNEQFF

SEQ ID NO: 3139 - protein, 13 aa, Human
CASSLFLSGELFF

SEQ ID NO: 3140 - protein, 13 aa, Human
CASSLFRGYEQFF

SEQ ID NO: 3141 - protein, 22 aa, Human
CASSLFSPGVGTSVGRGDTQYF

SEQ ID NO: 3142 - protein, 15 aa, Human
CASSLGALYENIHYF

SEQ ID NO: 3143 - protein, 13 aa, Human
CASSLGATGELFF

SEQ ID NO: 3144 - protein, 13 aa, Human
CASSLGFTDTQYF

SEQ ID NO: 3145 - protein, 13 aa, Human
CASSLGSVTEQYF

SEQ ID NO: 3146 - protein, 14 aa, Human
CASSLISGNYEQYF

SEQ ID NO: 3147 - protein, 15 aa, Human
CASSLKDRGSYEQYF

SEQ ID NO: 3148 - protein, 18 aa, Human
CASSLLSFGGRAGDEQFF

SEQ ID NO: 3149 - protein, 18 aa, Human
CASSLLSFGGRAGNEQFF

SEQ ID NO: 3150 - protein, 13 aa, Human
CASSLNRKETQYF

SEQ ID NO: 3151 - protein, 13 aa, Human
CASSLQANQPQHF

SEQ ID NO: 3152 - protein, 15 aa, Human
CASSLQGDTTYEQYF

SEQ ID NO: 3153 - protein, 15 aa, Human
CASSLRAPSSYEQYF

SEQ ID NO: 3154 - protein, 13 aa, Human
CASSLRESYEQYF

SEQ ID NO: 3155 - protein, 14 aa, Human
CASSLRGATDTQYF

SEQ ID NO: 3156 - protein, 13 aa, Human
CASSLSAGGGYTF

SEQ ID NO: 3157 - protein, 16 aa, Human
CASSLSDRGRSNEQFF

SEQ ID NO: 3158 - protein, 13 aa, Human
CASSLSGANVLTF

SEQ ID NO: 3159 - protein, 14 aa, Human
CASSLSGGTYEQYF

SEQ ID NO: 3160 - protein, 16 aa, Human
CASSLSLGLAGIEQFF

SEQ ID NO: 3161 - protein, 16 aa, Human
CASSLSLLGNDNEQFF

SEQ ID NO: 3162 - protein, 16 aa, Human
CASSLSPSGSSNTQYF

SEQ ID NO: 3163 - protein, 15 aa, Human
CASSLSRGLLNEQFF

SEQ ID NO: 3164 - protein, 15 aa, Human
CASSLSRGSLYEQYF

SEQ ID NO: 3165 - protein, 15 aa, Human
CASSLSRTGSSEAFF

SEQ ID NO: 3166 - protein, 14 aa, Human
CASSLSSPLNEQFF

SEQ ID NO: 3167 - protein, 16 aa, Human
CASSLSWGSPQNEQFF

SEQ ID NO: 3168 - protein, 14 aa, Human
CASSLTLGGYEQFF

SEQ ID NO: 3169 - protein, 14 aa, Human
CASSLTSGTYEQYF

SEQ ID NO: 3170 - protein, 16 aa, Human
CASSLVSLAGEYEQYF

SEQ ID NO: 3171 - protein, 15 aa, Human
CASSLWDGTMDTQYF

SEQ ID NO: 3172 - protein, 15 aa, Human
CASSLWGAGANVLTF

SEQ ID NO: 3173 - protein, 13 aa, Human
CASSLYPQGKLFF

SEQ ID NO: 3174 - protein, 15 aa, Human
CASSLYSGGSGEQYF

SEQ ID NO: 3175 - protein, 15 aa, Human
CASSPDSLLYNEQFF

SEQ ID NO: 3176 - protein, 13 aa, Human
CASSPFLSGELYF

SEQ ID NO: 3177 - protein, 16 aa, Human
CASSPGASGSYNEQFF

SEQ ID NO: 3178 - protein, 14 aa, Human
CASSPGQGGYEQYF

SEQ ID NO: 3179 - protein, 13 aa, Human
CASSPGTAAEQYF

SEQ ID NO: 3180 - protein, 16 aa, Human
CASSPGTGGYYNEQFF

SEQ ID NO: 3181 - protein, 16 aa, Human
CASSPGTIDSGNTIYF

SEQ ID NO: 3182 - protein, 16 aa, Human
CASSPHPTGSADTQYF

SEQ ID NO: 3183 - protein, 15 aa, Human
CASSPLETAGDGYTF

SEQ ID NO: 3184 - protein, 15 aa, Human
CASSPLKTAGDGYTF

SEQ ID NO: 3185 - protein, 12 aa, Human
CASSPPGKTQYF

SEQ ID NO: 3186 - protein, 16 aa, Human
CASSPRGAGGPYEQYF

SEQ ID NO: 3187 - protein, 17 aa, Human
CASSPRVPGQVNSPLHF

SEQ ID NO: 3188 - protein, 14 aa, Human
CASSPSTGAPEAFF

SEQ ID NO: 3189 - protein, 15 aa, Human
CASSPSTGGSQPQHF

SEQ ID NO: 3190 - protein, 15 aa, Human
CASSPTAGGRNEQYF

SEQ ID NO: 3191 - protein, 12 aa, Human
CASSPYTGELFF

SEQ ID NO: 3192 - protein, 15 aa, Human
CASSQTSGTAYEQYF

SEQ ID NO: 3193 - protein, 13 aa, Human
CASSRAANYGYTF

SEQ ID NO: 3194 - protein, 14 aa, Human
CASSRADPQETQYF

SEQ ID NO: 3195 - protein, 13 aa, Human
CASSRGESGELFF

SEQ ID NO: 3196 - protein, 14 aa, Human
CASSRQGDTYEQYF

SEQ ID NO: 3197 - protein, 16 aa, Human
CASSSDASWGTDTQYF

SEQ ID NO: 3198 - protein, 15 aa, Human
CASSSEGQATYEQYF

SEQ ID NO: 3199 - protein, 13 aa, Human
CASSSFDSYGYTF

SEQ ID NO: 3200 - protein, 13 aa, Human
CASSSGGLNEQFF

SEQ ID NO: 3201 - protein, 13 aa, Human
CASSSGRFTEAFF

SEQ ID NO: 3202 - protein, 13 aa, Human
CASSSLPLYEAFF

SEQ ID NO: 3203 - protein, 19 aa, Human
CASSSQDPGLAGVYNEQFF

SEQ ID NO: 3204 - protein, 15 aa, Human
CASSSTGQGNQPQHF

SEQ ID NO: 3205 - protein, 16 aa, Human
CASSSWDSGSSYEQYF

SEQ ID NO: 3206 - protein, 13 aa, Human
CASSSWDSYEQYF

SEQ ID NO: 3207 - protein, 15 aa, Human
CASSSYRGGPYEQYF

SEQ ID NO: 3208 - protein, 12 aa, Human
CASSTGLYGYTF

SEQ ID NO: 3209 - protein, 14 aa, Human
CASSTGMNTGELFF

SEQ ID NO: 3210 - protein, 20 aa, Human
CASSTHRGGNSVDGNQPQHF

SEQ ID NO: 3211 - protein, 17 aa, Human
CASSVRRGPKNTGELFF

SEQ ID NO: 3212 - protein, 15 aa, Human
CASSWDRGGSQPQHF

SEQ ID NO: 3213 - protein, 14 aa, Human
CASSWGRGTGELFF

SEQ ID NO: 3214 - protein, 15 aa, Human
CASSWQKRGTDTQYF

SEQ ID NO: 3215 - protein, 15 aa, Human
CASSWTSGRVDEQFF

SEQ ID NO: 3216 - protein, 13 aa, Human
CASSYFRGNEQFF

SEQ ID NO: 3217 - protein, 13 aa, Human
CASSYLKGTEQYF

SEQ ID NO: 3218 - protein, 11 aa, Human
CASTDAGELFF

SEQ ID NO: 3219 - protein, 12 aa, Human
CASTGGTDTQYF

SEQ ID NO: 3220 - protein, 13 aa, Human
CASTSGGTGELFF

SEQ ID NO: 3221 - protein, 15 aa, Human
CATRIQPSPYNEHFF

SEQ ID NO: 3222 - protein, 13 aa, Human
CATRTGVVNEHFF

SEQ ID NO: 3223 - protein, 16 aa, Human
CATSPGTGGYYNDQFF

SEQ ID NO: 3224 - protein, 12 aa, Human
CACCFGGPEPFF

SEQ ID NO: 3225 - protein, 11 aa, Human
CACFWGGQLFF

SEQ ID NO: 3226 - protein, 15 aa, Human
CACQPPEGLSETQYF

SEQ ID NO: 3227 - protein, 13 aa, Human
CAIRTSGTDTQYF

SEQ ID NO: 3228 - protein, 13 aa, Human
CANKQRDRYQQNF

SEQ ID NO: 3229 - protein, 12 aa, Human
CASASNYNEQFF

SEQ ID NO: 3230 - protein, 13 aa, Human
CASEGPENTEAFF

SEQ ID NO: 3231 - protein, 16 aa, Human
CASFTRVAASGNTIYF

SEQ ID NO: 3232 - protein, 18 aa, Human
CASGSGEPPVVGDYEQYF

SEQ ID NO: 3233 - protein, 15 aa, Human
CASKLGRQGIETQYF

SEQ ID NO: 3234 - protein, 16 aa, Human
CASKQAGGIGTDTQYF

SEQ ID NO: 3235 - protein, 18 aa, Human
CASLALGWRTSGTNEQFF

SEQ ID NO: 3236 - protein, 13 aa, Human
CASMASGKDEQFF

SEQ ID NO: 3237 - protein, 14 aa, Human
CASNRGQSFGEQYF

SEQ ID NO: 3238 - protein, 14 aa, Human
CASQSGTSGDEQYF

SEQ ID NO: 3239 - protein, 14 aa, Human
CASRATGSGNTIYF

SEQ ID NO: 3240 - protein, 15 aa, Human
CASRGTGTAIHEQYF

SEQ ID NO: 3241 - protein, 15 aa, Human
CASRIDRASSYEQYF

SEQ ID NO: 3242 - protein, 14 aa, Human
CASRIDSSYNEQFF

SEQ ID NO: 3243 - protein, 14 aa, Human
CASRPPQGGYGYTF

SEQ ID NO: 3244 - protein, 16 aa, Human
CASRRMDRQIAETQYF

SEQ ID NO: 3245 - protein, 13 aa, Human
CASRSSGMDEQFF

SEQ ID NO: 3246 - protein, 15 aa, Human
CASRTQREANNEQFF

SEQ ID NO: 3247 - protein, 15 aa, Human
CASRYFRDRAGELFF

SEQ ID NO: 3248 - protein, 18 aa, Human
CASSERKRDKLHTDTQYF

SEQ ID NO: 3249 - protein, 14 aa, Human
CASSFDSLNTEAFF

SEQ ID NO: 3250 - protein, 15 aa, Human
CASSFFGQGANEQYF

SEQ ID NO: 3251 - protein, 11 aa, Human
CASSFGGEQFF

SEQ ID NO: 3252 - protein, 14 aa, Human
CASSFGILTYEQYF

SEQ ID NO: 3253 - protein, 16 aa, Human
CASSFLAGGSGNEQFF

SEQ ID NO: 3254 - protein, 14 aa, Human
CASSFNSGNYGYTF

SEQ ID NO: 3255 - protein, 18 aa, Human
CASSFQGQGALFAYEQYF

SEQ ID NO: 3256 - protein, 15 aa, Human
CASSFQTGGGTEAFF

SEQ ID NO: 3257 - protein, 15 aa, Human
CASSFSRTRTDTQYF

SEQ ID NO: 3258 - protein, 14 aa, Human
CASSFWRSGNEQFF

SEQ ID NO: 3259 - protein, 13 aa, Human
CASSGTGGYEQYF

SEQ ID NO: 3260 - protein, 15 aa, Human
CASSIDREVRYEQYF

SEQ ID NO: 3261 - protein, 10 aa, Human
CASSIEEQFF

SEQ ID NO: 3262 - protein, 13 aa, Human
CASSLARQNEQYF

SEQ ID NO: 3263 - protein, 15 aa, Human
CASSLDRARKETQYF

SEQ ID NO: 3264 - protein, 13 aa, Human
CASSLEPLDGYTF

SEQ ID NO: 3265 - protein, 13 aa, Human
CASSLEVWGELFF

SEQ ID NO: 3266 - protein, 15 aa, Human
CASSLGIAGGYEQFF

SEQ ID NO: 3267 - protein, 12 aa, Human
CASSLGRETQYF

SEQ ID NO: 3268 - protein, 15 aa, Human
CASSLGTGTYNEQFF

SEQ ID NO: 3269 - protein, 13 aa, Human
CASSLGYSYEQYF

SEQ ID NO: 3270 - protein, 15 aa, Human
CASSLKKGEIYEQYF

SEQ ID NO: 3271 - protein, 12 aa, Human
CASSLLDLEQYF

SEQ ID NO: 3272 - protein, 16 aa, Human
CASSLLGRAVSYEQYF

SEQ ID NO: 3273 - protein, 17 aa, Human
CASSLLHSASGANVLTF

SEQ ID NO: 3274 - protein, 16 aa, Human
CASSLLRDQRGYEQYF

SEQ ID NO: 3275 - protein, 13 aa, Human
CASSLNMVYGYTF

SEQ ID NO: 3276 - protein, 12 aa, Human
CASSLNTGELFF

SEQ ID NO: 3277 - protein, 11 aa, Human
CASSLPGSYTF

SEQ ID NO: 3278 - protein, 15 aa, Human
CASSLQGTGWTEAFF

SEQ ID NO: 3279 - protein, 14 aa, Human
CASSLQGYPYEQYF

SEQ ID NO: 3280 - protein, 14 aa, Human
CASSLSMGSDTQYF

SEQ ID NO: 3281 - protein, 18 aa, Human
CASSLTSGGYSSTDTQYF

SEQ ID NO: 3282 - protein, 15 aa, Human
CASSLVAGEPYEQYF

SEQ ID NO: 3283 - protein, 13 aa, Human
CASSLVLVYEQYF

SEQ ID NO: 3284 - protein, 14 aa, Human
CASSLWGSTDTQYF

SEQ ID NO: 3285 - protein, 14 aa, Human
CASSLWGTLYEQYF

SEQ ID NO: 3286 - protein, 14 aa, Human
CASSMTGTFNEQFF

SEQ ID NO: 3287 - protein, 15 aa, Human
CASSPGIDLNQPQHF

SEQ ID NO: 3288 - protein, 13 aa, Human
CASSPGLATEQYF

SEQ ID NO: 3289 - protein, 17 aa, Human
CASSPMGGLAGVYEQYF

SEQ ID NO: 3290 - protein, 15 aa, Human
CASSPPGGGNSPLHF

SEQ ID NO: 3291 - protein, 17 aa, Human
CASSPPGTGVLGTEAFF

SEQ ID NO: 3292 - protein, 14 aa, Human
CASSPRGTFYGYTF

SEQ ID NO: 3293 - protein, 15 aa, Human
CASSPSGTGLETQYF

SEQ ID NO: 3294 - protein, 13 aa, Human
CASSPTGSFEQYF

SEQ ID NO: 3295 - protein, 14 aa, Human
CASSPTGTKNGYTF

SEQ ID NO: 3296 - protein, 14 aa, Human
CASSQTGAAYEQYF

SEQ ID NO: 3297 - protein, 15 aa, Human
CASSRGGEDTGELFF

SEQ ID NO: 3298 - protein, 14 aa, Human
CASSRIADMNEQFF

SEQ ID NO: 3299 - protein, 15 aa, Human
CASSRLRERGETQYF

SEQ ID NO: 3300 - protein, 15 aa, Human
CASSSDRVRNQPQHF

SEQ ID NO: 3301 - protein, 14 aa, Human
CASSSIGTAYEQYF

SEQ ID NO: 3302 - protein, 16 aa, Human
CASSSSGTQNTDTQYF

SEQ ID NO: 3303 - protein, 14 aa, Human
CASSSTGFSEKLFF

SEQ ID NO: 3304 - protein, 16 aa, Human
CASSSWTSGDTDTQYF

SEQ ID NO: 3305 - protein, 12 aa, Human
CASSTVQNEQFF

SEQ ID NO: 3306 - protein, 15 aa, Human
CASSWDFSSYNEQFF

SEQ ID NO: 3307 - protein, 12 aa, Human
CASSWGGKEQYF

SEQ ID NO: 3308 - protein, 13 aa, Human
CASSWGQVSEQYF

SEQ ID NO: 3309 - protein, 14 aa, Human
CASSYLAGAYEQYF

SEQ ID NO: 3310 - protein, 15 aa, Human
CASTDGLAGAYEQYF

SEQ ID NO: 3311 - protein, 13 aa, Human
CASTITENTEAFF

SEQ ID NO: 3312 - protein, 16 aa, Human
CASTLGLAGPPYEQYF

SEQ ID NO: 3313 - protein, 15 aa, Human
CATRFMAGPTHEQYF

SEQ ID NO: 3314 - protein, 15 aa, Human
CATSRSGSLTDTQYF

SEQ ID NO: 3315 - protein, 14 aa, Human
CSAGTGGTNEKLFF

SEQ ID NO: 3316 - protein, 13 aa, Human
CSARQGSAYEQYF

SEQ ID NO: 3317 - protein, 17 aa, Human
CSGEGRSTSGGFDEQFF

SEQ ID NO: 3318 - protein, 15 aa, Human
CSTRLAGERQETQYF

SEQ ID NO: 3319 - protein, 15 aa, Human
CSVADSIGAKNIQYF

SEQ ID NO: 3320 - protein, 13 aa, Human
CSVASGTGYEQYF

SEQ ID NO: 3321 - protein, 15 aa, Human
CSVDPTGRGQETQYF

SEQ ID NO: 3322 - protein, 12 aa, Human
CSVDRGENIQYF

SEQ ID NO: 3323 - protein, 11 aa, Human
CSVDRNTEAFF

SEQ ID NO: 3324 - protein, 14 aa, Human
CSVDSRGSYNEQFF

SEQ ID NO: 3325 - protein, 14 aa, Human
CSVDVQGRTDTQYF

SEQ ID NO: 3326 - protein, 11 aa, Human
CSVEAVRTLFF

SEQ ID NO: 3327 - protein, 16 aa, Human
CSVEAWERGNTGELFF

SEQ ID NO: 3328 - protein, 16 aa, Human
CSVEDGGGSNTGELFF

SEQ ID NO: 3329 - protein, 15 aa, Human
CSVEDPLAEVETQYF

SEQ ID NO: 3330 - protein, 14 aa, Human
CSVEDPQGNYGYTF

SEQ ID NO: 3331 - protein, 17 aa, Human
CSVEDWDSGTAADTQYF

SEQ ID NO: 3332 - protein, 12 aa, Human
CSVEETNYEQYF

SEQ ID NO: 3333 - protein, 10 aa, Human
CSVEGEEQFF

SEQ ID NO: 3334 - protein, 14 aa, Human
CSVEGNGGANVLTF

SEQ ID NO: 3335 - protein, 13 aa, Human
CSVEGRLGNTIYF

SEQ ID NO: 3336 - protein, 15 aa, Human
CSVEGSGRTYNEQFF

SEQ ID NO: 3337 - protein, 17 aa, Human
CSVEGTVDREAWETQYF

SEQ ID NO: 3338 - protein, 11 aa, Human
CSVELFNEQYF

SEQ ID NO: 3339 - protein, 13 aa, Human
CSVELGGAYEQYF

SEQ ID NO: 3340 - protein, 14 aa, Human
CSVETSGRFNEQFF

SEQ ID NO: 3341 - protein, 14 aa, Human
CSVEVAGGGETQYF

SEQ ID NO: 3342 - protein, 13 aa, Human
CSVEVLGNYGYTF

SEQ ID NO: 3343 - protein, 16 aa, Human
CSVEWSEGHSYNEQFF

SEQ ID NO: 3344 - protein, 14 aa, Human
CSVGAGGTNEKLFF

SEQ ID NO: 3345 - protein, 14 aa, Human
CSVGFRGTGYEQYF

SEQ ID NO: 3346 - protein, 12 aa, Human
CSVGGSFYGYTF

SEQ ID NO: 3347 - protein, 12 aa, Human
CSVGIVSEGYTF

SEQ ID NO: 3348 - protein, 11 aa, Human
CSVGTTYEQYF

SEQ ID NO: 3349 - protein, 11 aa, Human
CSVKTGNSYTF

SEQ ID NO: 3350 - protein, 16 aa, Human
CSVLGTESSSYNEQFF

SEQ ID NO: 3351 - protein, 12 aa, Human
CSVPRLGGELFF

SEQ ID NO: 3352 - protein, 11 aa, Human
CSVQDYYEQYF

SEQ ID NO: 3353 - protein, 13 aa, Human
CSVQSGYTGELFF

SEQ ID NO: 3354 - protein, 14 aa, Human
CSVTDVQFSYEQYF

SEQ ID NO: 3355 - protein, 14 aa, Human
CSVVGDSFTDTQYF

SEQ ID NO: 3356 - protein, 12 aa, Human
CSVVSGAYEQYF

SEQ ID NO: 3357 - protein, 13 aa, Human
CSVWGGGSYEQYF

SEQ ID NO: 3358 - protein, 12 aa, Human
CACRDSGNEQFF

SEQ ID NO: 3359 - protein, 12 aa, Human
CARGWGNDEQYF

SEQ ID NO: 3360 - protein, 11 aa, Human
CAWDGYNEQFF

SEQ ID NO: 3361 - protein, 10 aa, Human
CAWGLDTQYF

SEQ ID NO: 3362 - protein, 10 aa, Human
CAWGLNTQYF

SEQ ID NO: 3363 - protein, 13 aa, Human
CAWKLTGLYEQYF

SEQ ID NO: 3364 - protein, 14 aa, Human
CAWNVQAGKETQYF

SEQ ID NO: 3365 - protein, 14 aa, Human
CAWRAGTGVNEQFF

SEQ ID NO: 3366 - protein, 11 aa, Human
CAWRNSGEQYF

SEQ ID NO: 3367 - protein, 15 aa, Human
CAWRTLSGAYNEQFF

SEQ ID NO: 3368 - protein, 13 aa, Human
CAWSADMNTEAFF

SEQ ID NO: 3369 - protein, 12 aa, Human
CAWSDGGKTQYF

SEQ ID NO: 3370 - protein, 12 aa, Human
CAWSEGNHEQFF

SEQ ID NO: 3371 - protein, 14 aa, Human
CAWSGDRFQDTQYF

SEQ ID NO: 3372 - protein, 13 aa, Human
CAWSGTSYNEQFF

SEQ ID NO: 3373 - protein, 10 aa, Human
CAWSGYEQYF

SEQ ID NO: 3374 - protein, 14 aa, Human
CAWSKTGTGDEQYF

SEQ ID NO: 3375 - protein, 14 aa, Human
CAWSPTSGRNEQFF

SEQ ID NO: 3376 - protein, 14 aa, Human
CAWSRDSGTDTQYF

SEQ ID NO: 3377 - protein, 17 aa, Human
CAWSSFGGLAGSYEQYF

SEQ ID NO: 3378 - protein, 13 aa, Human
CAWSTGGATEAFF

SEQ ID NO: 3379 - protein, 14 aa, Human
CAWSVGTGGFEQFF

SEQ ID NO: 3380 - protein, 14 aa, Human
CAWSVQAGKETHYF

SEQ ID NO: 3381 - protein, 14 aa, Human
CAWSVQAGKETQYF

SEQ ID NO: 3382 - protein, 16 aa, Human
CAWSVQGYWEVHYGYT

SEQ ID NO: 3383 - protein, 14 aa, Human
CAWSVQPGKETPYF

SEQ ID NO: 3384 - protein, 14 aa, Human
CAWSVQSGSHEQFF

SEQ ID NO: 3385 - protein, 13 aa, Human
CAWSVSVSLEQYF

SEQ ID NO: 3386 - protein, 16 aa, Human
CAWSVTGFPPTGELFF

SEQ ID NO: 3387 - protein, 14 aa, Human
CAWSVVGGGNGYPF

SEQ ID NO: 3388 - protein, 14 aa, Human
CAWVYRAANTEAFF

SEQ ID NO: 3389 - protein, 16 aa, Human
CPSGRGRPGGPETQYF

SEQ ID NO: 3390 - protein, 9 aa, Human
CYTWNQMNL

SEQ ID NO: 3391 - DNA, 18 bp, Artificial Sequence
  TCR-beta chain constant region specific primer
caccagtgtggccttttg

SEQ ID NO: 3392 - DNA, 23 bp, Artificial Sequence
  3'Cbeta reverse primer
gcttctgatggctcaaacacagc

SEQ ID NO: 3393 - DNA, 21 bp, Artificial Sequence
  5'Cbeta reverse primer
ggaacacgtttttcaggtcct

SEQ ID NO: 3394 - DNA, 24 bp, Artificial Sequence
  Vbeta family specific forward primer
ggtcacacagatgggacaggaagt

SEQ ID NO: 3395 - DNA, 24 bp, Artificial Sequence
  Vbeta family specific forward primer
cccagactccaaaatacctggtca

SEQ ID NO: 3396 - DNA, 27 bp, Artificial Sequence
  Vbeta family specific forward primer
tacgcagacaccaagaacacctggtca

SEQ ID NO: 3397 - DNA, 26 bp, Artificial Sequence
  Vbeta family specific forward primer
acagcaagtgactagctgagatgctc

SEQ ID NO: 3398 - DNA, 24 bp, Artificial Sequence
  Vbeta family specific forward primer
gtgtcactcagaccccaaaattcc

SEQ ID NO: 3399 - DNA, 24 bp, Artificial Sequence
  Vbeta family specific forward primer
gtgtgatccaatttcaggtcatac

SEQ ID NO: 3400 - DNA, 25 bp, Artificial Sequence
  Vbeta family specific forward primer
atgtaactcttcaggtgtgatccaa

SEQ ID NO: 3401 - DNA, 26 bp, Artificial Sequence
  Vbeta family specific forward primer
acagcaagtgactagctgagatgctc

SEQ ID NO: 3402 - DNA, 24 bp, Artificial Sequence
  Vbeta family specific forward primer
ccaagacacaaggtcacagagaca

SEQ ID NO: 3403 - DNA, 27 bp, Artificial Sequence
  Vbeta family specific forward primer
cagtctcccagatataagattatagag

SEQ ID NO: 3404 - DNA, 24 bp, Artificial Sequence
  Vbeta family specific forward primer
ggtgacagagatgggacaagaagt

SEQ ID NO: 3405 - DNA, 27 bp, Artificial Sequence
  Vbeta family specific forward primer
ctgatcaaagaaaagagggaaacagcc

SEQ ID NO: 3406 - DNA, 24 bp, Artificial Sequence
  Vbeta family specific forward primer
atagaagctggagttactcagttc

SEQ ID NO: 3407 - DNA, 24 bp, Artificial Sequence
  Vbeta family specific forward primer
caagataccaggttacccagtttg

SEQ ID NO: 3408 - DNA, 24 bp, Artificial Sequence
  Vbeta family specific forward primer
tgcagaacccaagacacctggtca

SEQ ID NO: 3409 - DNA, 24 bp, Artificial Sequence
  Vbeta family specific forward primer
cactcagtccccaaagtacctgtt

SEQ ID NO: 3410 - DNA, 24 bp, Artificial Sequence
  Vbeta family specific forward primer
gagtgccgttccctggactttcag

SEQ ID NO: 3411 - DNA, 24 bp, Artificial Sequence
  Vbeta family specific forward primer
aaggtcacccagagacctagactt

SEQ ID NO: 3412 - DNA, 24 bp, Artificial Sequence
  Vbeta family specific forward primer
acaaagatggattgtacccccgaa

SEQ ID NO: 3413 - DNA, 24 bp, Artificial Sequence
  Vbeta family specific forward primer
gttacccagaccccaaggaatagg

SEQ ID NO: 3414 - DNA, 25 bp, Artificial Sequence
  Vbeta family specific forward primer
gatcactctggaatgttctcaaacc

SEQ ID NO: 3415 - DNA, 24 bp, Artificial Sequence
  Vbeta family specific forward primer
gtgacccagaacccaagatacctc

SEQ ID NO: 3416 - DNA, 24 bp, Artificial Sequence
  Vbeta family specific forward primer
gtaacccagagctcgagatatcta

SEQ ID NO: 3417 - DNA, 26 bp, Artificial Sequence
  Vbeta family specific forward primer
tccagtgtcaagtccatagccaagtc

SEQ ID NO: 3418 - DNA, 27 bp, Artificial Sequence
  Vbeta family specific forward primer
gtcagatctcagactattcatcaatgg

1. A polynucleotide having a nucleotide sequence encoding CDR3 of a Vβ chain of a T-cell receptor (TCR) of a WT1-specific cytotoxic T-cell (CTL), said polynucleotide having DNA having any of the CDR3 nucleotide sequences shown in SEQ ID Nos.: 1-1695, RNA complementary to the DNA, or a polynucleotide having a complementary sequence thereof.

2. The polynucleotide according to claim 1, wherein said polynucleotide consists of a DNA comprising any of the CDR3 nucleotide sequences shown in SEQ ID Nos.: 1-1695, or an RNA complementary thereto, or complementary sequences thereof.

3. A peptide having an amino acid sequence of CDR3 of a Vβ chain of a T-cell receptor (TCR) of a WT1-specific cytotoxic T-cell (CTL), said peptide having any of the amino acid sequences of CDR3 shown in SEQ ID Nos.: 1696-3389.

4. The peptide according to claim 3 consisting of any of the amino acid sequences of CDR3 shown in SEQ ID Nos.: 1696-3389.

5. Use of the polynucleotide of claim 1 or 2, or the peptide of claim 3 or 4 as a cancer marker.

6. A method for diagnosing cancer in an HLA-A*2402-positive patient, which comprises assessing the clonality of a WT1-specific CTL having any of the polynucleotides of claim 1 or 2, or any of the peptides of claim 3 or 4 in a sample obtained from the patient before therapy, wherein when a WT1-specific CTL having a multiplicity of clonality is present, the patient is determined to have a possibility of having cancer.

7. The method according to claim 6, wherein a higher possibility of developing cancer in the patient before therapy is determined when the clonality of a WT1-specific CTL having any of the CDR3 polynucleotides or any of the CDR3 peptides and having the clonality of 3 or more is higher, or when the types of a WT1-specific CTL having the clonality of 3 or more are more abundant.

8. A method for testing for sensitivity of an HLA-A*2402-positive patient to WT1 peptide immunotherapy, which comprises assessing the clonality and the number of types of WT1-specific CTLs having any of the polynucleotides of claim 1 or 2 or any of the peptides of claim 3 or 4 in a sample obtained from the patient before therapy, wherein the patient is determined to have sensitivity to WT1 peptide immunotherapy when the types of WT1-specific CTLs with a multiplicity of clonality are more abundant in the patient than in a subject non-responsive to the therapy.

9. The method according to claim 8, wherein a patient is determined to have higher sensitivity to WT1 peptide immunotherapy when the types of WT1-specific CTL clones with a multiplicity of clonality are more abundant, or the clonality is larger in the patient before the therapy.

10. A method for monitoring WT1 peptide immunotherapy in an HLA-A*2402-positive patient, which comprises assessing the clonality of WT1-specific CTL clones having any of the polynucleotides of claim 1 or 2 or any of the peptides of claim 3 or 4 in a sample obtained from the patient before and after the therapy, wherein the patient is determined to have responded to WT1 peptide immunotherapy when the clonality of any of the WT1-specific CTL clones increases after the therapy compared to before the therapy.

11. The method according to claim 10, wherein a patient is determined to have higher responsiveness to WT1 peptide immunotherapy when the larger becomes the increase rate in the clonality, or the more abundant become the types of clones with increased clonality after the WT1 peptide immunotherapy.

12. An antibody against the peptide of claim 3 or 4.

13. A chip comprising the polynucleotide of claim 1 or 2, the peptide of claim 3 or 4, or the antibody of claim 12.

14. A primer for amplifying a CDR3 polypeptide, which has a sequence selected from the sequences shown in SEQ ID Nos.: 3389-3416.

15. A kit for diagnosing cancer, a kit for testing for sensitivity of a patient to WT1 peptide immunotherapy, or a kit for monitoring WT1 peptide immunotherapy, comprising means for detecting a WT1-specific CTL having the polynucleotide of claim 1 or 2 or the peptide of claim 3 or 4.

16. A device for cancer diagnosis, a device for testing for sensitivity of a patient to WT1 peptide immunotherapy, or a device for monitoring WT1 peptide immunotherapy, comprising means for detecting a WT1-specific CTL having the polynucleotide of claim 1 or 2 or the peptide of claim 3 or 4.

17. The kit according to claim 15, comprising the chip of claim 13 or the primer of claim 14.

18. The device according to claim 16, wherein the chip of claim 13 or the primer of claim 14 is used in the device.

19. A lymphocyte of an HLA-A*2402-positive cancer patient, into which a T-cell receptor gene comprising a sequence of the polynucleotide of claim 1 or 2 is introduced.
